(19) United States
(12) Patent Application Publication
(10) Pub. No.: US 2026/0076375 A1
(43) Pub. Date: Mar. 19, 2026

(54) PLANT DISEASE CONTROL COMPOSITION, PLANT DISEASE CONTROL METHOD, AND USE OF ORGANIC SILICONE-BASED SURFACTANT

(71) Applicants: KANEKA CORPORATION, Osaka (JP); MITSUI & CO., LTD., Tokyo (JP)

(72) Inventors: Nobuhiko Dojun, Shizuoka (JP); Shinichi Yoshida, Shizuoka (JP); Hitoshi Kudo, Tokyo (JP)

(73) Assignees: KANEKA CORPORATION, Osaka (JP); MITSUI & CO., LTD., Tokyo (JP)

(21) Appl. No.: 19/343,920

(22) Filed: Sep. 29, 2025

Related U.S. Application Data
(63) Continuation of application No. PCT/JP2024/012616, filed on Mar. 28, 2024.

(30) Foreign Application Priority Data
Mar. 30, 2023 (JP) 2023-054722

(51) Int. Cl. A01N 63/40; A01N 25/02; A01P 1/00

(52) U.S. Cl. CPC A01N 63/40; A01N 25/02; A01P 1/00

(57) ABSTRACT

A composition for plant disease control containing a bacteriophage, wherein the composition for plant disease control is inhibited from decreasing in the bacteriolytic activity or maintains the bacteriolytic activity, and has excellent persistence characteristics, is provided. The composition for plant disease control contains a bacteriophage with bacteriolytic activity against bacteria and an organic silicone-based surfactant.

### SEQUENCE LISTING

[0001] This application contains a sequence listing in computer readable form (File name: “PH-10223-PCT_Sequence Listing.xml”; date of creation: Sep. 25, 2025; File size: 603,130 bytes), which is incorporated herein by reference in its entirety and forms part of the disclosure.

### TECHNICAL FIELD

[0002] One or more embodiments of the present invention relate to a composition for plant disease control, a method for controlling plant disease, and use of an organic silicone-based surfactant.

### BACKGROUND

[0003] To control harmful bacteria causative of various plant diseases in crops, an agricultural chemical compound, such as a copper agent or an antibiotic, has been used. However, there are drug effects, drug poisoning, and as well as possible causes for the disruption of a bacterial flora balance. Hence, recent interest has focused on a method using a bacteriophage as a new control method. A bacteriophage (herein also referred to as a “phage”) is a generic term for viruses that infect only bacteria. Many phages, also called bacteriolytic phages, specifically attach to target host bacteria, then inject their own DNA, and self-amplify by utilizing the translational mechanism of the bacteria. Furthermore, the bacteria are bacteriolyzed, and consequently, the amplified phages are propagated, and an infection into new target bacteria is repeated. A biopesticide for controlling harmful bacteria causative of a plant disease by utilizing such bacteriolytic activity of a bacteriophage has been developed and studied.

[0004] For example, Patent Literature 1 discloses a composition for plant disease biocontrol formulated for delivery to a plant, wherein the composition comprises at least one kind of carrier and at least one bacteriophage selected from the group consisting of the Xfas100 phage type and the Xfas300 phage type, wherein the bacteriophage is virulent to Xylella fastidiosa and Xanthomonas species (Claim 12). Additionally, Patent Literature 1 states that such a composition can be applied by spraying, misting, or scattering on the plant, and that the carrier may comprise a diluent, a surfactant, and/or a buffer.

### PATENT LITERATURE

[0005] [Patent Literature 1] JP2015-534983A

### SUMMARY

[0006] Unlike a conventional copper agent and/or antibiotic, a bacteriophage, which is one species of virus, is a natural product, and the manifestation of its drug poisoning has hitherto not been reported. Additionally, a phage has a comparatively high specificity to a host, and thus, only targets bacteria of a specific genus or species, having an extremely limited influence on a bacterial flora balance. Additionally, a phage is harmless to not only an animal such as a human but also to a plant, and is very safe. Hence, a bacteriophage is a control means that has been attracting much attention in recent years.

[0007] A method for applying the above-described biopesticide to a target plant to be controlled is, for example, a method for application by dispersing or the like on a leaf face or the like of a plant, as described in Patent Literature 1. In some of the cases where a conventional agricultural chemical compound, such as a copper agent and/or an antibiotic, is used, a sticking agent is added to the agricultural chemical composition to enhance the residual amount on the leaf face and/or stem, and thereby ensure the drug efficacy. As such a sticking agent, any of various surfactants can be used for an agricultural chemical compound. However, the characteristics, properties, dynamics, and the like of a bacteriophage are obviously different from the characteristics, properties, dynamics, and the like of an agricultural chemical compound, such as a copper agent and/or an antibiotic. Thus, applying the sticking agent usable for an agricultural chemical compound directly for a biopesticide containing a bacteriophage is not necessarily possible for the purpose of enhancing the residual amount of a bacteriophage in a plant. Specifically, a bacteriophage is one species of virus, and thus, mixing a bacteriophage with a surfactant as a sticking agent are unable to obtain desired persistence characteristics and/or desired bacteriolytic activity (efficacy).

[0008] In view of this, a composition for plant disease control comprising a bacteriophage, wherein the composition for plant disease control is inhibited from decreasing in the bacteriolytic activity or maintains the bacteriolytic activity, and has excellent persistence characteristics, is provided.

[0009] In view of the above, the present inventors have made studies vigorously, and have reached one or more embodiments of the present invention through the discovery that using an organic silicone-based surfactant enables a composition for plant disease control to be provided, wherein the composition is inhibited from decreasing in the bacteriolytic activity or maintains the bacteriolytic activity, and has excellent persistence characteristics.

[0010] In view of this, examples of aspects according to one or more embodiments of the present invention are as follows.
[0011] (1) A composition for plant disease control, comprising: a bacteriophage with bacteriolytic activity against bacteria; and an organic silicone-based surfactant.
[0012] (2) The composition for plant disease control according to (1), wherein the organic silicone-based surfactant is a silicone oil having a polyether group(s).
[0013] (3) The composition for plant disease control according to (1) or (2), wherein the organic silicone-based surfactant is at least one selected from the group consisting of trisiloxaneethoxylate, polyoxyethylene methylpolysiloxane, polyoxyalkylene methylpolysiloxane, and a polyether polymethylsiloxane copolymer.
[0014] (4) The composition for plant disease control according to any one of (1) to (3), wherein the organic silicone-based surfactant is trisiloxaneethoxylate.
[0015] (5) The composition for plant disease control according to any one of (1) to (4), wherein the organic silicone-based surfactant is polyalkylene-oxide-modified heptamethyltrisiloxane.
[0016] (6) The composition for plant disease control according to any one of (1) to (5), further comprising an agriculturally acceptable carrier and/or an agriculturally acceptable solvent.
[0017] (7) A method for controlling plant disease, comprising a step of contacting the composition for plant disease control according to any one of (1) to (6) to a target plant.
[0018] (8) A method for controlling plant disease, comprising: a step of preparing a composition for plant disease control by mixing a bacteriophage with bacteriolytic activity against bacteria with an organic silicone-based surfactant; and a step of contacting the composition for plant disease control to a target plant to be controlled.
[0019] (9) The method for controlling plant disease according to (8), wherein the organic silicone-based surfactant is a silicone oil having a polyether group(s).
[0020] (10) The method for controlling plant disease according to (8) or (9), wherein the organic silicone-based surfactant is at least one selected from the group consisting of trisiloxaneethoxylate, polyoxyethylene methylpolysiloxane, polyoxyalkylene methylpolysiloxane, and a polyether polymethylsiloxane copolymer.
[0021] (11) The method for controlling plant disease according to any one of (8) to (10), wherein the organic silicone-based surfactant is trisiloxaneethoxylate.
[0022] (12) The method for controlling plant disease according to any one of (8) to (11), wherein the organic silicone-based surfactant is polyalkylene-oxide-modified heptamethyltrisiloxane.
[0023] (13) The method for controlling plant disease according to any one of (8) to (12), wherein the step of preparing comprises preparing a composition for plant disease control by further mixing an agriculturally acceptable carrier and/or an agriculturally acceptable solvent in addition to the bacteriophage and the organic silicone-based surfactant.
[0024] (14) Use of an organic silicone-based surfactant in a composition for plant disease control containing a bacteriophage with bacteriolytic activity against bacteria, wherein the use is for enhancing the residual amount of the composition for plant disease control in a target plant.
[0025] (15) Use of an organic silicone-based surfactant in the production of a composition for plant disease control containing a bacteriophage with bacteriolytic activity against bacteria.

[0026] The present specification encompasses the disclosure of Japanese Patent Application Nos. 2023-054722 that serves as a basis for the priority of the present application.

[0027] One aspect of one or more embodiments of the present invention can provide a composition for plant disease control comprising a bacteriophage, wherein the composition for plant disease control is inhibited from decreasing in the bacteriolytic activity or maintains the bacteriolytic activity, and has excellent persistence characteristics.

### BRIEF DESCRIPTION OF THE DRAWINGS

[0028] FIGS. 1A-1D relate to a test example (Comparative Example 2) having no sticking agent added therein and a test example (Example 2) having an organic silicone-based sticking agent added therein. FIG. 1A graphs the residual amount (PFU/cm²) of a phage on the leaf surface of the day 0 sample; FIG. 1B graphs the residual amount (PFU/cm²) of a phage on the leaf surface of the day 4 sample; FIG. 1C graphs the residual amount (PFU/cm²) of a phage inside the leaf of the day 0 sample; and FIG. 1D graphs the residual amount (PFU/cm²) of a phage inside the leaf of the day 4 sample.

[0029] FIGS. 2A-2D relate to test examples including use of a 4th phage, as follows: a test example (Comparative Example 3-1) having no sticking agent added therein; a test example (Example 3-1) having an organic silicone-based sticking agent (Silwet L-77 (hereinafter referred to as SL)) added therein; or a test example (Example 3-2) having an organic silicone-based sticking agent (MAKUPIKA) added therein. FIG. 2A graphs the residual amount (PFU/cm²) of a phage on the leaf surface of the day 0 sample; FIG. 2B graphs the residual amount (PFU/cm²) of a phage on the leaf surface of the day 4 sample; FIG. 2C graphs the residual amount (PFU/cm²) of a phage inside the leaf of the day 0 sample; and FIG. 2D graphs the residual amount (PFU/cm²) of a phage inside the leaf of the day 4 sample.

[0030] FIGS. 3A-3D relate to test examples including use of a 5th phage, as follows: a test example (Comparative Example 3-2) having no sticking agent added therein, a test example (Example 3-3) having an organic silicone-based sticking agent (SL) added therein, or a test example (Example 3-4) having an organic silicone-based sticking agent (MAKUPIKA) added therein. FIG. 3A graphs the residual amount (PFU/cm²) of a phage on the leaf surface of the day 0 sample; FIG. 3B graphs the residual amount (PFU/cm²) of a phage on the leaf surface of the day 4 sample; FIG. 3C graphs the residual amount (PFU/cm²) of a phage inside the leaf of the day 0 sample; and FIG. 3D graphs the residual amount (PFU/cm²) of a phage inside the leaf of the day 4 sample.

[0031] FIGS. 4A-4D relate to test examples including use of an excised broccoli leaf, as follows: a test example (Comparative Example 4-1) having no sticking agent added therein and a test example (Example 4-1) having an organic silicone-based sticking agent (SL) added therein. FIG. 4A graphs the residual amount (PFU/cm²) of a phage on the leaf surface of the day 0 sample; FIG. 4B graphs the residual amount (PFU/cm²) of a phage on the leaf surface of the day 4 sample; FIG. 4C graphs the residual amount (PFU/cm²) of a phage inside the leaf of the day 0 sample; and FIG. 4D graphs the residual amount (PFU/cm²) of a phage inside the leaf of the day 4 sample.

[0032] FIGS. 5A-5D relate to test examples including use of an excised tomato leaf, as follows: a test example (Comparative Example 4-2) having no sticking agent added therein and a test example (Example 4-2) having an organic silicone-based sticking agent (SL) added therein. FIG. 5A graphs the residual amount (PFU/cm²) of a phage on the leaf surface of the day 0 sample; FIG. 5B graphs the residual amount (PFU/cm²) of a phage on the leaf surface of the day 4 sample; FIG. 5C graphs the residual amount (PFU/cm²) of a phage inside the leaf of the day 0 sample; and FIG. 5D graphs the residual amount (PFU/cm²) of a phage inside the leaf of the day 4 sample.

### DETAILED DESCRIPTION

### 1. Definition

[0033] Terms used herein are defined below.

[0034] A term “plant disease” as used herein is a generic term for diseases that develop in a plant. A known plant disease includes a disease caused by an infectious pathogen such as a virus, bacterium, filamentous fungus, actinomycete, viroid, Phytoplasma, nematode, mite, or insect, and a disease caused by a noninfectious pathogen such as the lack or excess of a nutrient or water, drug poisoning, or the like. A plant disease herein refers to a disease whose pathogens are bacteria, i.e., a plant pathogenic bacterium, unless otherwise specified.

[0035] A term “control” as used herein refers to prevention or treatment (extermination) (based on the home page of the Japan Crop Protection Association). Accordingly, “plant disease control” as used herein refers to the prevention of a plant disease, particularly against a target bacterium, or to the treatment of a plant disease caused by a target bacterium.

[0036] A term “target plant” as used herein refers to a plant to which the composition for plant disease control according to the present disclosure is to be applied. This plant is a plant that has a specific plant disease caused by the infection of the target bacteria, or a plant that has the possibility of being infected by the target bacteria.

### 2. Composition for Plant Disease Control

### 2-1. Overview

[0037] One aspect of one or more embodiments of the present invention is a composition for plant disease control. The composition for plant disease control according to one or more embodiments of the present invention comprises: a bacteriophage with bacteriolytic activity against bacteria; and an organic silicone-based surfactant.

[0038] The composition for plant disease control according to one or more embodiments of the present invention is inhibited from decreasing in the bacteriolytic activity or maintains the bacteriolytic activity, and has excellent persistence characteristics. The composition exhibits bacteriolytic activity against a target bacterium as a potential pathogenic bacterium of a plant disease, and also has excellent persistence characteristics in a plant. Additionally, using the composition for plant disease control according to one or more embodiments of the present invention for plant disease control can provide sustainable plant protectives (agricultural chemicals) against a bacterial plant disease, wherein the protectives are safe for the human body, free from drug poisoning to the environment, and capable of preventing or treating a plant disease of interest specifically. The phrase “inhibited form decreasing in the bacteriolytic activity or maintains the bacteriolytic activity” means that the bacteriolytic activity of the composition for plant disease control according to one or more embodiments of the present invention may corresponds to, for example, 85% or more, 90% or more, 95% or more, or 100% or more, of the bacteriolytic activity of a composition for plant disease control having the same composition except for containing no organic silicone-based surfactant. The bacteriolytic activity of the composition can be expressed as a titer based on the plaque forming unit (PFU) in a plaque assay method, and, for example, can be measured using a plaque assay method after the composition is left to stand in a thermostatic chamber at 25° C. overnight (approximately 16 hours).

[0039] The term “composition for plant disease control” as used herein refers to a composition used for plant disease control.

### 2-2. Constitution

### 2-2-1. Component

[0040] The composition for plant disease control according to one or more embodiments of the present invention comprises, as an essential component, a bacteriophage that, in the form of an active ingredient, exhibits bacteriolytic activity against bacteria. Additionally, the composition for plant disease control according to one or more embodiments of the present invention also comprises an organic silicone-based surfactant as an essential component. Using an organic silicone-based surfactant enables enhancement of the residual amount of a bacteriophage as an active ingredient after application of the bacteriophage to a plant. Additionally, the composition for plant disease control according to one or more embodiments of the present invention may comprise an agriculturally acceptable carrier and/or an agriculturally acceptable solvent. The agriculturally acceptable carrier and/or the agriculturally acceptable solvent preferably do/does not inhibit or suppress the bacteriolytic activity against a target bacterium for the phage. Furthermore, the composition for plant disease control according to one or more embodiments of the present invention may comprise another active ingredient, if desired. Below, each component will be described specifically.

### (1) Bacteriophage

[0041] The composition for plant disease control according to one or more embodiments of the present invention comprises, as an essential active ingredient, a bacteriophage with bacteriolytic activity against bacteria. Because this active ingredient bacteriolyzes the target bacteria of one or more embodiments of the present invention, the composition for plant disease control can prevent or treat a plant disease caused by the target bacteria. The bacteriophage may be used alone, or two or more species thereof may be used in combination.

[0042] In one or more embodiments of the present invention, a bacteriophage is not particularly limited as long as it has bacteriolytic activity against a target bacterium. Many bacteriophages are specific to a specific genus, species, or strain of bacteria. The term “bacteriophage” has the same meaning as the term “phage.”

[0043] The bacteriophage is not particularly limited, and is, for example, a bacteriophage that belongs to any of the following virus families: Myoviridae, Siphoviridae, Podoviridae, Autographiviridae, Ackermannviridae, Corticoviridae, Cystoviridae, Inoviridae, Leviviridae, Microviridae, or Tectiviridae. The bacteriophage can be a bacteriolytic bacteriophage. The bacteriolytic bacteriophage does not enter a lysogenic pathway, and traces a bacteriolytic pathway through completion of a bacteriolytic cycle.

[0044] Additionally, the bacteriophage in one or more embodiments of the present invention may be derived from the Caudovirales phages. Caudovirales is the order of bacteriophages having a double-strand DNA (dsDNA) genome, and having a tail. Each virion of the Caudovirales order has a virion genome and an icosahedral head containing a flexible tail. The Caudovirales order includes, for example, the following bacteriophage families: Myoviridae (a long contractile tail), Siphoviridae (a long noncontractile tail), Podoviridae (a short noncontractile tail), Autographiviridae, and Ackermannviridae.

[0045] When the composition is used for plant disease control, the amount of the active ingredient comprised per unit amount in the composition for plant disease control depends on various conditions, such as the dosage form, the kind of plant pathogenic bacteria, the kind of a target plant, the site of application, and the method of application. The amount to be comprised may be sufficient for the phage, as an active ingredient, to contact and infect plant pathogenic bacteria that have infected a target plant. Accordingly, it can be determined within the scope of common technical knowledge in the art, considering the conditions such that the bacteriolytic agent comprised in the composition for plant disease control according to one or more embodiments of the present invention is in an effective amount for target bacteria after application.

[0046] The concentration of the bacteriophage in the composition for plant disease control according to one or more embodiments of the present invention is not particularly limited, and can be suitably set in accordance with the kind or degree of a disease as a target for application, the method for application, or the dosage form. The concentration of the bacteriophage may be, for example, 1×10³ PFU/mL or more, 1×10⁴ PFU/mL or more, 1×10⁵ PFU/mL or more, 1×10⁶ PFU/mL or more, or 1×10⁷ PFU/mL or more. Additionally, the concentration of the bacteriophage may be, for example, 10¹⁵ PFU/mL or less, 10¹⁴ PFU/mL or less, or 10¹³ PFU/mL or less. An upper limit value and a lower limit value from these value ranges can be arbitrarily combined to prescribe a preferred range.

[0047] The composition for plant disease control according to one or more embodiments of the present invention may comprise, as an active ingredient(s), one or more species of phages in combination. For example, even if target bacteria are the same between phages, the phages, if capable of recognizing different cell surface receptors, can be expected to allow a synergistic effect and/or supportive effect of the bacteriolytic activity, depending on the combination. Additionally, even though target bacteria are different, the phages can achieve bacteriolytic activity against the different bacteria, and can be expected to have control activity against pathogens in a wider range.

### (2) Organic Silicone-Based Surfactant

[0048] The composition for plant disease control according to one or more embodiments of the present invention comprises an organic silicone-based surfactant as an essential component. The organic silicone-based surfactant may be used alone, or two or more kinds thereof may be used in combination. For example, the reason containing an organic silicone-based surfactant enables a bacteriophage to be inhibited from decreasing in, or maintain, the bacteriolytic activity, and simultaneously enhance the persistence characteristics, although the reason is by inference, is as follows.

[0049] The reason bacteriolytic activity is inhibited from decreasing or why bacteriolytic activity is maintained is considered to be that an organic silicone-based surfactant allows a bacteriophage to function without being modified. The capsid of a bacteriophage and the tail fiber important for contact with a target host are composed of protein. Depending on the kind of a sticking agent to be mixed in, the bacteriolytic activity of a bacteriophage can be decreased remarkably. This is considered to be because such a sticking agent that remarkably decreases the bacteriolytic activity of a bacteriophage modifies the phage to thereby make the phage unable to exert the bacteriolytic activity against a disease bacterium. On the other hand, an organic silicone-based surfactant conceivably does not modify a bacteriophage, and thus, allows the bacteriophage to be inhibited from decreasing in, or maintain, the bacteriolytic activity. Furthermore, the residual amount of the bacteriophage is increased conceivably because the surfactant action of organic silicone-based surfactant makes it easy for a bacteriophage to have access to a plant cell of a plant leaf.

[0050] An organic silicone-based surfactant (also referred to as an organic silicone-based sticking agent) mainly refers to a silicone oil having hydrophilicity given by introduction of the organic functional group, such as polyether group, and, for example, refers to a silicone oil having a polyether group(s). As an organic group to be introduced into the organic silicone-based surfactant, various organic groups other than the above-described polyether group are known, and can be used as long as they serve the present disclosure. Examples of organic silicone-based surfactants having a polyether group(s) introduced thereinto include a compound represented by the following structural formula (I):

[chemical structure]

[wherein, in the formula (I),
[0051] R₁ is an organic group represented by the following general formula (II):

[chemical structure]

(wherein, in the formula (II), R₂ is an unsubstituted or substituted C₂₋₆ alkylene group; R₃ is a hydrogen atom, an unsubstituted or substituted C₁₋₆ alkyl group, or an acetyl group (—COCH₃); x is an integer of 0 to 15; and y is an integer of 0 to 10);
[0052] Me is a methyl group;
[0053] m is an integer of 0 to 10; and
[0054] n is an integer of 1 to 10].

[0055] Desirably, in the structural formula (I),
[0056] R₁ is an organic group represented by the following general formula (III):

[chemical structure]

(wherein, in the formula, R₂ is a propylene group; R₃ is a hydrogen atom or a methyl group; and x is an integer of 0 to 15);
[0057] Me is a methyl group;
[0058] m is an integer of 0 to 3; and
[0059] n is 1.

[0060] The organic silicone-based surfactant may be at least one selected from the group consisting of trisiloxaneethoxylate, polyoxyethylene methylpolysiloxane, polyoxyalkylene methylpolysiloxane, and a polyether polymethylsiloxane copolymer. Among these, trisiloxaneethoxylate, polyoxyethylene methylpolysiloxane, or trisiloxaneethoxylate is preferable, and trisiloxaneethoxylate is more preferable.

[0061] Specific examples of organic silicone-based surfactants include the following (tradenames). Examples of trisiloxaneethoxylate include Silwet L-77, Silwet 408, or Silwet 440 (registered trademarks; manufactured by Momentive Performance Materials, Inc.). Examples of polyoxyethylene methylpolysiloxane include MAKUPIKA (registered trademark; manufactured by Ishihara Sangyo Kaisha, Ltd.). Examples of polyoxyalkylene methylpolysiloxane include KF-640 (manufactured by Shin-Etsu Chemical Co., Ltd.). Examples of the polyether polymethylsiloxane copolymer include BREAK-THRU (registered trademark; manufactured by Evonik Goldschmidt Chemical Corporation) or BREAK-THRU (registered trademark; manufactured by Sankei Chemical Co., Ltd.). Additionally, some commercially available organic silicone-based surfactants further contain another component.

[0062] The trisiloxaneethoxylate may be, for example, polyalkylene-oxide-modified heptamethyltrisiloxane “Silwet L-77”.

[0063] The amount of an organic silicone-based surfactant contained in the composition is not particularly limited, and can be suitably selected, considering various conditions, such as the species of plant pathogenic bacteria, the species of a target plant, the site of application, and the method for application. For example, the commercially available product Silwet L-77 can be added to the composition for plant disease control in such a manner that the amount of the product contained in the composition is diluted, for example, 500-fold to 5000-fold (preferably 1000-fold to 3000-fold) with respect to the stock solution.

(3) Agriculturally Acceptable Carrier and/or Agriculturally Acceptable Solvent

[0064] The composition for plant disease control according to one or more embodiments of the present invention may comprise an agriculturally acceptable carrier and/or an agriculturally acceptable solvent.

[0065] An agriculturally acceptable carrier refers to a substance that facilitates the application of a composition, can maintain the survivability and infectiousness of a phage as an active ingredient, and/or can regulate the rate of action. The agriculturally acceptable carrier may be a substance that has no or an extremely small harmful influence on an environment, such as the soil and the water quality, when applied outdoor, and that further has no or an extremely low harmfulness to an animal, particularly a human.

[0066] Specific examples of agriculturally acceptable carriers include: surfactants other than an organic silicone-based surfactant; protective agents; excipients and the like. Additionally, if desired, a moisturizer, emulsifying agent, pH buffering agent, and the like may be utilized in small amounts. The carrier may be blended in advance, or may be blended immediately before application.

[0067] The surfactant has an effect on enhancing the physicochemical properties of the composition against parts of a plant, in which the properties include hygroexpansivity (wetting capability), emulsifying capability, dispersibility, permeating capability, adhesiveness, defoaming capability, and spreading capability. The surfactant may be utilized as a main component of an agricultural adjuvant called a sticking agent. The sticking agent is, for example, a nonionic surfactant, anionic surfactant, cationic surfactant, or a combination thereof. More specific examples include polyoxyethylenealkyl ether-based compounds, polyoxyethylene fatty acid ester-based compounds, lignin sulfonic acid salt-based compounds, naphthylmethanesulfonic acid salt-based compounds, alkylsulfosuccinic acid salt-based compounds, or tetraalkylammonium salt-based compounds. However, a surfactant (other than an organic silicone-based surfactant) can influence the bacteriolytic activity of a phage. Thus, adding the surfactant in such an amount as to practically impair the effect of one or more embodiments of the present invention is desirably avoided. For example, the amount of the surfactant (other than an organic silicone-based surfactant) contained in the composition for plant disease control may be 10 mass % or less, 5 mass % or less, 3 mass % or less, 1 mass % or less, 0.5 mass % or less, 0.1 mass % or less, 0.05 mass % or less, 0.01 mass % or less, or 0.001 mass % or less.

[0068] A protective agent is expected to have an effect such as decreasing damage for a phage due to ultraviolet rays. Examples include skim milks, caseins, gelatins or the like.

[0069] Examples of excipients include glucose, lactose, sucrose, gelatin, starch, malt, flours or the like.

[0070] Specific examples of agriculturally acceptable solvents include water (including an aqueous solution), buffers, liquid culture media, or the like. The solvent may be an aseptic liquid.

### (4) Another Active Ingredient

[0071] The composition for plant disease control according to one or more embodiments of the present invention may comprise, in addition to the above-described bacteriophage, one or more other active ingredients having different pharmacologic actions. Examples of the other active ingredients include insecticides, nematicides, miticides, herbicides, plant growth promoters, antibiotics, biological agricultural chemicals and the like.

### 2-2-2. Dosage Form

[0072] The dosage form of the composition for plant disease control according to one or more embodiments of the present invention may be any dosage form, as long as it is possible that the fixability to a site of infection of target bacteria on a target plant or a target plant, and/or the susceptible to infection of a phage as an active ingredient against target bacteria is maintained. The composition for plant disease control may be, for example, a liquid or a water-dispersible agent in a liquid state, obtained by suspending a bacteriophage in a suitable solution. For example, when the site of infection of target bacteria on a target plant is a leaf, flower, fruit, stem, branch, or trunk in the aerial part, a liquid, water-dispersible agent, or gel, which widely spreads in such a site of infection, and has high fixability, is suitable, without limitation.

### 2-3. Method for Preparation

[0073] The composition for plant disease control according to one or more embodiments of the present invention can be prepared, for example, by mixing the following: a bacteriophage with bacteriolytic activity against bacteria; and an organic silicone-based surfactant. Additionally, an agriculturally acceptable carrier and/or an agriculturally acceptable solvent may be further mixed in addition to the bacteriophage and the organic silicone-based surfactant to prepare the composition for plant disease control. The bacteriophage may be provided in the form of a liquid or solid bacteriolytic agent. The bacteriolytic agent contains a bacteriophage as an active ingredient, and itself can have bacteriolytic activity. The bacteriolytic agent is mixed with an organic silicone-based surfactant and, if desired, an agriculturally acceptable carrier and/or medium during or immediately before application to a plant, and used to prepare the composition for plant disease control. The bacteriolytic agent may be, for example, a liquid or a water-dispersible agent in a liquid state, obtained by suspending a bacteriophage in a suitable solution, or may be mixed with a carrier and solidified to be formed into a solid-state powder, granule, or gel. The bacteriolytic agent can be provided in a state where a bacteriophage is concentrated. For example, the bacteriolytic agent may be a culture preparation of a bacteriophage used directly or diluted, or may be prepared in the form of a suspension obtained by suspending a bacteriophage in a solvent, such as water or a buffer solution.

### 2-4. Method for Application

[0074] The method for applying the composition for plant disease control according to one or more embodiments of the present invention is not particularly limited as long as it enables the composition for plant disease control to come into contact with a target plant to be controlled, and, is for example, a method for direct spraying or scattering on crops, or a method for scattering on soil. Additionally, the composition for plant disease control may be directly dispersed or sprayed, or may be diluted with water or the like, if desired, and applied.

[0075] The amount of application of the composition for plant disease control differs depending on the crop as a target for application, target disease, method for application, occurrence tendency, degree of damage, environment conditions, dosage form to be used, or the like, and thus, is desirably adjusted suitably.

### 2-5. Target Plant

[0076] A target plant for the composition for plant disease control according to one or more embodiments of the present invention is not particularly limited to any kind, as long as it is possible to develop a plant disease caused by bacteria. The target plant may be either an angiosperm or a gymnosperm. Furthermore, the plant may be an herbaceous plant or a woody plant. Suitable specific examples of target plants include agriculturally important plants, for example: crop plants such as cereal crops, vegetables, and fruits; and flowers and ornamental plants. Specific examples include monocotyledons, such as Poaceae plants (for example, rice, wheat, barley, corn, sugarcane, Sorghum, kaoliangs, and turfgrasses), Musaceae plants (for example, bananas), Amaryllidaceae plants (for example, Allium, onions, garlic, and garlic chives), and Liliaceae plants (for example, lilies and tulips). Additional examples include dicotyledons, such as Brassicaceae plants (for example, broccoli, cabbages, radishes, Chinese cabbages, and rapeseeds), Asteraceae plants (for example, lettuces, burdocks, and chrysanthemums), Fabaceae plants (for example, soybeans, peanuts, garden peas, phaseoli, lentils, chickpeas, fava beans, and licorice), Solanaceae plants (for example, tomatoes, eggplants, potatoes, tobaccos, bell peppers, red peppers, and petunia), Rosaceae plants (for example, strawberries, apples, pears, peaches, Eriobotrya, almonds, plums, roses, Japanese apricots, and cherries), Cucurbitaceae plants (for example, cucumbers, gourd, pumpkins, melons, and watermelons), Anacardiaceae plants (for example, mangoes, pistachios, and cashew nuts), Lauraceae plants (for example, avocadoes) Rutaceae plants (for example, mandarin oranges, grapefruits, lemons, and Citrus junos), Convolvulaceae plants (for example, sweet potatoes), Theaceae plants (for example, Camellia sinensis), and Vitaceae plants (for example, grapes).

### 2-6. Target Plant Disease

[0077] A target plant disease to which the composition for plant disease control according to one or more embodiments of the present invention is to be applied is any plant disease that is caused by bacteria, and is not particularly limited. Merely as one example, the target plant disease is, for example, a plant disease caused by bacteria of Xanthomonas genus. Examples include: bacterial spot (bacterial shot hole) observed in peaches and the like; bacterial blight observed in walnuts and the like; bacterial pustule observed in soybeans and the like; angular leaf spot observed in strawberries and the like; bacterial blight observed in tomatoes, bell peppers, lettuces, and the like; black rot observed in cabbages, Chinese cabbages, broccoli, and the like; bacterial canker observed in oranges, grapefruit, and the like; angular leaf spot observed in cotton and the like; and leaf blight observed in rice and the like. Other examples include: fire blight caused by bacteria of Erwinia genus and observed in an apple and the like; bacterial soft rot caused by bacteria of Pectobacterium genus and observed in Allium and the like; and ear soft rot caused by bacteria of Burkholderia genus and observed in corn and the like.

### 2-7. Effects

[0078] The composition for plant disease control according to one or more embodiments of the present invention has excellent bacteriolytic activity and excellent phage residual characteristics after application to a plant, and thus, is useful for preventing and inhibiting a disease due to a target bacterium. Additionally, since a phage is an organism-derived substance, there is no report of the manifestation of drug poisoning, and since a phage has high specificity, its influence on the balance of a bacterial flora is extremely limited.

### 3. Method for Controlling Plant Disease

[0079] One aspect of one or more embodiments of the present invention is a method for controlling plant disease. The method for controlling plant disease according to one or more embodiments of the present invention is characterized by contacting the composition for plant disease control according to one or more embodiments of the present invention to a target plant to control a plant disease of the target plant.

[0080] That is, one aspect of one or more embodiments of the present invention is a method for controlling plant disease, comprising a step of contacting the composition for plant disease control according to one or more embodiments of the present invention to a target plant.

[0081] Another aspect of one or more embodiments of the present invention is a method for controlling plant disease, comprising: a step of preparing a composition for plant disease control by mixing a bacteriophage with bacteriolytic activity against bacteria with an organic silicone-based surfactant; and a step of contacting the composition for plant disease control to a target plant to be controlled.

[0082] Herein, the “contact” refers to contact between a composition for plant disease control and a target plant. More specifically, the “contact” refers to contact between a composition for plant disease control and at least a part of a target plant. This contacting step is intended to infect a phage as an active ingredient with a target bacterium, whereby the target bacteria are bacteriolyzed. As a result, an effect on controlling the plant disease caused by target bacteria can be achieved.

[0083] The contact may be direct contact. The direct contact means that a composition for plant disease control, in liquid form or gel form, is spread, sprayed, scattered, or immersed on a target plant. In this case, the site of a plant as a target of contact is mainly a leaf, flower, fruit, stem, branch, and/or trunk.

### 4. Use of Organic Silicone-Based Surfactant

[0084] One aspect of one or more embodiments of the present invention is use of an organic silicone-based surfactant.

[0085] That is, one aspect of one or more embodiments of the present invention is use of an organic silicone-based surfactant in a composition for plant disease control containing a bacteriophage with bacteriolytic activity against bacteria, wherein the use is for enhancing the residual amount of the composition for plant disease control in a target plant.

[0086] Another aspect of one or more embodiments of the present invention is use of an organic silicone-based surfactant in the production of a composition for plant disease control containing a bacteriophage with bacteriolytic activity against bacteria.

### Examples

[0087] One or more embodiments of the present invention will be described in further detail below with reference to Examples. One or more embodiments of the present invention are not limited to these Examples.

### [Phages Used]

[0088] In the present test example, the following phages were used.
[0089] 1st phage (Myoviridae): SEQ ID NO: 13
[0090] 2nd phage (Autographiviridae): SEQ ID NO: 14
[0091] 3rd phage (Myoviridae): SEQ ID NO: 15
[0092] 4th phage (Siphoviridae): SEQ ID NO: 12
[0093] 5th phage (Siphoviridae): SEQ ID NO: 18
[0094] 6th phage (Myoviridae): SEQ ID NO: 11
[0095] 7th phage (Siphoviridae): SEQ ID NO: 17
[0096] 8th phage (Autographiviridae): SEQ ID NO: 16

### Example 1 and Comparative Example 1

### (Aim)

[0097] The influence of a mixture of a sticking agent and phage on the bacteriolytic activity is confirmed.

### (Method and Results)

### Preparation of Solution of Mixture of Phage and Sticking Agent, and Evaluation of the Activity

[0098] Silwet L-77 (manufactured by Momentive Performance Materials, Inc.), which is a nonionic surfactant and also an organic silicone-based surfactant, was added to, and mixed with, an aqueous phage solution containing the 1st phage (Myoviridae), the 2nd phage (Autographiviridae), or the 3rd phage (Myoviridae) to prepare the respective phage compositions. In the preparation of the compositions, the concentration of Silwet L-77 was adjusted so as to be 3000-fold diluted. The phage concentration of the solution prepared is commonly expressed using the titer [PFU/mL] based on the plaque forming unit (PFU) in a plaque assay method. Each phage composition was prepared in such a manner that the titer measured immediately after preparation was 10⁴ PFU/mL. Each phage composition having no sticking agent added therein was also prepared with addition of water so as to have the same degree of titer (10⁴ PFU/mL).

[0099] In Comparative Example, DRIVER (registered trademark; 24.0% of polyoxyethylene fatty acid ester; manufactured by Maruwa Biochemical Co., Ltd.), which is a nonionic surfactant and also an organic solvent-based surfactant, or MIXPOWER (registered trademark; 40.0% of polyoxyethylenealkyl ether, 40.0% of polyoxyethylene alkyl phenyl ether; manufactured by Syngenta Global AG) was added to, and mixed with, an aqueous phage solution including the 1st phage (Myoviridae), the 2nd phage (Autographiviridae), or the 3rd phage (Myoviridae) to prepare the respective phage compositions. In the preparation of the compositions, the concentration of each of DRIVER and MIXPOWER was adjusted so as to be 3000-fold diluted. Preparations were made in such a manner that the titer measured immediately after preparation was the same degree of titer (10⁴ PFU/mL) in the same manner as in Example above.

[0100] Each phage composition prepared was left to stand in a thermostatic chamber at 25° C. overnight (approximately 16 hours). Then, using the plaque assay method, the titer of each phage composition was calculated. The ratio of the titer of the composition having a sticking agent added therein relative to the titer of the composition having no sticking agent added therein was calculated.

### Results

[0101] The ratio of titer of the phage composition having Silwet L-77 added therein to the phage composition having no sticking agent added therein was approximately 1.0. With Silwet L-77 added, almost no decrease in titer was observed in any of the phages. On the other hand, in Comparative Example, the ratio of titer of the phage composition having DRIVER or MIXPOWER added therein to the phage composition having no sticking agent added therein was approximately 0.6 to 0.8. Thus, a decrease in titer was observed in the phage composition having DRIVER or MIXPOWER mixed therein. The above-described results have verified that the bacteriolytic activity of the phage may remarkably decrease in some cases, depending on the kind of the sticking agent mixed in, but that the organic silicone-based surfactant caused the phage to undergo a smaller decrease in the bacteriolytic activity or no decrease in the bacteriolytic activity.

### Example 2 and Comparative Example 2

### (Aim)

[0102] The residual amount of a bacteriophage after application of spray solution of phage containing an organic silicone-based surfactant on a peach leaf is evaluated.

### (Method and Results)

[0103] Dispersing of solution of mixture of phage and sticking agent on excised peach leaf Silwet L-77 (manufactured by Momentive Performance Materials, Inc.) as an organic silicone-based surfactant was added to, and mixed with, an aqueous phage solution containing the 1st phage (Myoviridae) in water to prepare a phage composition (also referred to as a spray solution of the 1st phage), which, as a composition for plant disease control, was dispersed on an excised peach leaf. Then, the residual amount of the phage was evaluated (Example 2). The amount of addition of the organic silicone-based surfactant was adjusted so as to be a 3000-fold diluted concentration. The phage concentration of the spray solution of phage prepared is commonly expressed using the titer [PFU/mL] based on the plaque forming unit (PFU) in a plaque assay method. The spray solution of phage, as a composition for plant disease control, was prepared so as to be 10⁶ PFU/mL.

[0104] Additionally, an aqueous phage solution (10⁶ PFU/mL) having no organic silicone-based surfactant added therein was prepared as a control, and evaluated as a composition for plant disease control in the same manner (Comparative Example 2).

[0105] In such a manner that the spray solution of phage prepared spreads sufficiently on the excised peach leaf, the solution was dispersed at approximately 2.5 mL per leaf. The solution was dispersed on 3 leaves per condition (n=3). Immediately after the dispersion, a small circular piece (day 0 sample) having a diameter of 1 cm was cut out at 3 sites from the excised peach leaf. Then, the excised peach leaf was inserted in a corning tube containing absorbent cotton wetted to prevent drying. The rack was turned sideways and the tube was left to stand in an incubator at 25° C. The leaf was left to stand in the incubator for 4 days. Then, a small circular piece (day 4 sample) was cut out at 3 sites.

[0106] Each one of the small circular piece samples cut out (the day 0 sample and the day 4 sample) was inserted into a tube, to which 0.1 mL of sterile water was added. The resulting mixture was stirred and centrifuged to yield a supernatant, which was then collected as a leaf-surface extract solution of the excised peach leaf.

[0107] Then, 0.1 mL of sterile water was again added to the tube containing the excised peach leaf sample from which the leaf-surface extract solution had been obtained. The small circular piece was crushed by a beads-shocker. A supernatant obtained after centrifugation was collected as an internal extract solution of the excised peach leaf.

Evaluation of Residual Amount of Phage by qPCR

[0108] On the day 0 samples immediately after the dispersion and the day 4 samples after an elapse of 4 days, qPCR was performed to quantify the phage for measurement of the residual amounts of the phages from the resulting leaf-surface extract solutions and internal extract solutions. Specifically, a calibration curve was prepared using a solution the titer of phage of which had been adjusted. On the basis of the calibration curve, the titer was calculated from the Ct value of the sample solution, and the phage remaining in the peach leaf was quantified. The extract solution of the excised peach leaf, prepared in the previous section, was diluted 10-fold with sterile water, and used as a template for qPCR.

[0109] Using Powerup SYBR Green Master Mix (Applied Biosystems) as a qPCR enzyme, a reaction solution was prepared in accordance with the method described in the manual. The PCR conditions were set as follows: 50° C. for 2 min.; 95° C. for 2 min.; and 40 cycles of 95° C. for 15 sec, 58° C. for 15 sec and 72° C. for 1 min. In the Table below, a primer set used is shown. No primer dimer was observed, and the PCR reaction progressed normally. As the result of qPCR, a Ct value under each condition was obtained.

TABLE 1

| Primer | Sequence (5′→3′) | Length (bp) |
|---|---|---|
| SEQ ID NO: 1 | TTTCTGAGTTCTCGCCCCAC | 130 |
| SEQ ID NO: 2 | GCGGACGTATTTCCGCTTTC | |

[0110] To calculate, from the Ct value obtained, the concentrations of the phage present on the surface of the excised peach leaf and inside of the leaf, it is necessary to prepare a calibration straight line between the titer [PFU/mL] in the plaque assay method and the Ct value. To perform the plaque assay method, the bacterium shown in the Table below was used as a host. Bacterium of Xanthomonas genus was used as a plant pathogenic bacterium, and the bacterial strain was obtained from the National Agriculture and Food Research Organization (NARO).

TABLE 2

| | | Source of | Place of |
|---|---|---|---|
| ID | Name of species | separation | picking |
| MAFF No. | Xanthomonas arboricola | Peach | FUKUSHIMA |
| 311351 | pv. Pruni | | |

[0111] To culture the above-described bacterium, 1 g of peptone, 1 g of a yeast extract, and 2 g of glucose were dissolved in 0.2 L of water, and autoclaved to be sterilized. The resulting liquid culture medium (YPG Broth) was used. Additionally, agar was added at 15 g per L to the above-described Broth (YPG Broth) and autoclaved to be sterilized, and the resulting agar culture medium (referred to as “YPG Agar”) was used. Furthermore, to prepare a soft agar culture medium (Top Agar) to be superposed on the upper layer of the agar culture medium, agarose was added at 5 g per L to the above-described Broth (YPG Broth), and autoclaved to be sterilized. The resulting Top Agar was stored at approximately 50° C., and utilized when necessary.

[0112] For the purpose of calculating the titer in accordance with the plaque assay method, the bacterial suspension and the phage-containing solution were mixed in equal amounts, and left at room temperature for approximately 10 minutes. Next, 0.2 mL of the bacteria/phage mixture liquid was added to 3 mL of Top Agar, quickly mixed with a vortex mixer, and then poured on YPG Agar. After the Top Agar was solidified, static culture was performed at 25° C. for approximately 12 hours. On the bacterial lawn formed by the culture, a bacteriolytic plaque was formed. The plaque forming unit was measured to calculate the titer.

[0113] Next, to prepare a calibration curve, a phage solution the titer of which was adjusted to 10⁶ to 10² PFU/mL was prepared. From the Ct value obtained in qPCR, a calibration curve between the titer and the Ct value was prepared. Using this calibration curve, the titer of the extract solution of the excised peach leaf was determined. The template solution used was a liquid obtained by diluting 0.1 mL of the extract solution 10-fold, and thus, this has the same meaning as a diluting operation with 1 mL. Thus, the unit of the titer of the leaf extract solution obtained is PFU. To make a conversion from the titer obtained to the residual amount of the phage per unit area on the excised peach leaf, the area of the small circular piece was calculated at 0.5, ×0.5×3.14=0.785 cm², and the residual amount of the phage per unit area (PFU/cm²) was calculated.

### Results

[0114] The results are shown in FIGS. 1A-1D. FIGS. 1A-1D relate to a test example (Comparative Example 2) having no organic silicone-based surfactant added therein and a test example (Example 2) having an organic silicone-based surfactant added therein. FIG. 1A graphs the residual amount (PFU/cm²) of a phage on the leaf surface of the day 0 sample; FIG. 1B graphs the residual amount (PFU/cm²) of a phage on the leaf surface of the day 4 sample; FIG. 1C graphs the residual amount (PFU/cm²) of a phage inside the leaf of the day 0 sample; and FIG. 1D graphs the residual amount (PFU/cm²) of a phage inside the leaf of the day 4 sample.

[0115] As shown in FIGS. 1A-1D, the spray solution of phage (Example 2) having an organic silicone-based surfactant added therein, compared with the solution having no such addition (Comparative Example 2), allowed the residual amount of the phage after an elapse of 4 days to increase both on the surface of the excised peach leaf and inside the leaf. This indicates that the organic silicone-based surfactant has the effect of increasing the residual amount of the phage in application of the phage to a leaf.

### Example 3 and Comparative Example 3

### (Aim)

[0116] The effect of an organic silicone-based surfactant on enhancement of the residual amount of the phage is evaluated in a system in which a plurality of species of phages (the 4th phage (Siphoviridae) and the 5th phage (Siphoviridae)) different in the genome from Example 2 were used. As an organic silicone-based surfactant, MAKUPIKA (manufactured by Ishihara Sangyo Kaisha, Ltd.) was also used in addition to SL used in Example 2.

### (Method and Results)

[0117] Dispersion of solution of mixture of phage and sticking agent on excised peach leaf

[0118] A spray solution of the 4th phage (10⁶ PFU/mL) and a spray solution of the 5th phage (10⁶ PFU/mL) as compositions for plant disease control were prepared by the same method as in Example 2 except that the 4th phage or the 5th phage was used in place of the 1st phage. Additionally, a spray solution of the 4th phage (10⁶ PFU/mL) and a spray solution of the 5th phage (10⁶ PFU/mL) that both had, as an organic silicone-based surfactant, MAKUPIKA added therein in place of Silwet L-77 (SL) were prepared. The amount of addition of the organic silicone-based surfactant was adjusted so as to be a 3000-fold diluted concentration. That is, in the present test example, the spray solution of the 4th phage (Example 3-1) having an organic silicone-based surfactant (SL) added therein, the spray solution of the 4th phage (Example 3-2) having an organic silicone-based surfactant (MAKUPIKA) added therein, the spray solution of the 4th phage (Comparative Example 3-1) having no organic silicone-based surfactant added therein, the spray solution of the 5th phage (Example 3-3) having an organic silicone-based surfactant (SL) added therein, the spray solution of the 5th phage (Example 3-4) having an organic silicone-based surfactant (MAKUPIKA) added therein, and the spray solution of the 5th phage (Comparative Example 3-2) having no organic silicone-based surfactant added therein were each prepared, and dispersed on the excised peach leaf. The residual amount of the phage was evaluated. On the excised peach leaf, each spray solution in an amount of approximately 2.5 mL per leaf was dispersed. Under each condition, 3 leaves were used (n=3). From the excised peach leaf, after dispersion of the spray solution of phage, a leaf-surface extract solution and an internal extract solution were prepared by the same method as in Example 2.

Evaluation of Residual Amount of Bacteriophage by qPCR

[0119] qPCR was performed by the same method as described in Example 2 except that the primers listed in the Table below were used. Using the day 0 sample immediately after the dispersion and the day 4 sample after an elapse of 4 days, the residual amounts of the phage were measured from the resulting leaf-surface extract solution and internal extract solution.

TABLE 3

| Primer | Sequence (5′→3′) | Length (bp) |
|---|---|---|
| SEQ ID NO: 3 | TTTTTCTCGTCTGAGGCAGG | 115 |
| SEQ ID NO: 4 | GTGCTATGGTTCGGGACTTT | |
| SEQ ID NO: 5 | TCTTCGTCTCGGGCTTCTT | 102 |
| SEQ ID NO: 6 | CCGTTCTCCTTGTTGATGGT | |

### Results

[0120] The results are shown in FIGS. 2A-2D and FIGS. 3A-3D. FIGS. 2A-2D relate to test examples including use of a 4th phage, as follows: a test example (Comparative Example 3-1) having no organic silicone-based surfactant added therein; a test example (Example 3-1) having an organic silicone-based surfactant (SL) added therein; or a test example (Example 3-2) having an organic silicone-based surfactant (MAKUPIKA) added therein. FIG. 2A graphs the residual amount (PFU/cm²) of a phage on the leaf surface of the day 0 sample; FIG. 2B graphs the residual amount (PFU/cm²) of a phage on the leaf surface of the day 4 sample; FIG. 2C graphs the residual amount (PFU/cm²) of a phage inside the leaf of the day 0 sample; and FIG. 2D graphs the residual amount (PFU/cm²) of a phage inside the leaf of the day 4 sample. Additionally, FIGS. 3A-3D relate to test examples including use of a 5th phage, as follows: a test example (Comparative Example 3-2) having no organic silicone-based surfactant added therein, a test example (Example 3-3) having an organic silicone-based surfactant (SL) added therein, or a test example (Example 3-4) having an organic silicone-based surfactant (MAKUPIKA) added therein. FIG. 3A graphs the residual amount (PFU/cm²) of a phage on the leaf surface of the day 0 sample; FIG. 3B graphs the residual amount (PFU/cm²) of a phage on the leaf surface of the day 4 sample; FIG. 3C graphs the residual amount (PFU/cm²) of a phage inside the leaf of the day 0 sample; and FIG. 3D graphs the residual amount (PFU/cm²) of a phage inside the leaf of the day 4 sample.

[0121] The results of FIGS. 2A-2D and FIGS. 3A-3D, put together, are shown in the Table below.

TABLE 4

| | | | Residual amount of phage (PFU/cm²) | | | | | |
|---|---|---|---|---|---|---|---|---|
| | | | Immediately after application | | | After elapse of 4 days | | |
| | | | Leaf | Leaf | | Leaf | Leaf | |
| | Phage | Surfactant | surface | inside | Total | surface | inside | Total |
| Comparative | 4th | — | 5080 | 365 | 5445 | 68 | 33 | 101 |
| example 3-1 | | | | | | | | |
| Example 3-1 | 4th | SL | 4209 | 459 | 4668 | 659 | 175 | 834 |
| Example 3-2 | 4th | MAKUPIKA | 2514 | 342 | 2856 | 303 | 102 | 405 |
| Comparative | 5th | — | 5382 | 330 | 5712 | 455 | 38 | 493 |
| example 3-2 | | | | | | | | |
| Example 3-3 | 5th | SL | 5210 | 385 | 5595 | 665 | 290 | 955 |
| Example 3-4 | 5th | MAKUPIKA | 3024 | 657 | 3681 | 278 | 489 | 767 |

[0122] As shown in FIGS. 2A-2D and FIGS. 3A-3D and Table 4, the spray solution of the 4th phage or the spray solution of the 5th phage (Example 3-1 or Example 3-3) having an organic silicone-based surfactant (SL) added therein, compared with the spray solution of phage having no such addition (Comparative Example 3-1 or Comparative Example 3-2), allowed the residual amount of the phage after an elapse of 4 days to increase both on the surface of the excised peach leaf and inside the leaf. Additionally, the spray solution of the 4th phage or the spray solution of the 5th phage (Example 3-2 or Example 3-4) having an organic silicone-based surfactant (MAKUPIKA) added therein, compared with the spray solution of phage having no such addition (Comparative Example 3-1 or Comparative Example 3-2), allowed the residual amount of the phage after an elapse of 4 days to increase at least in the total amount of the phage on the leaf surface and the phage inside the leaf. These results have revealed that the addition of an organic silicone-based surfactant increased the residual amount of the phage, independent of the species of the phage and the kind of the organic silicone-based surfactant.

### Example 4 and Comparative Example 4

### (Aim)

[0123] The residual amount of a bacteriophage after dispersion of a phage solution containing an organic silicone-based surfactant on an excised broccoli leaf or an excised tomato leaf is evaluated.

### (Method and Results)

### Dispersion of Solution of Mixture of Phage and Sticking Agent on Excised Broccoli Leaf or Excised Tomato Leaf

[0124] Using the same method as in Example 2, Silwet L-77 (SL) as an organic silicone-based surfactant was added to an aqueous phage solution containing the 1st phage (Myoviridae) to prepare a spray solution of phage (10⁶ PFU/mL), which was then dispersed on an excised broccoli leaf or an excised tomato leaf. The residual amount of the phage was evaluated (Examples 4-1 and 4-2). The amount of addition of the organic silicone-based surfactant was adjusted so as to be a 3000-fold diluted concentration. The spray solution of phage prepared was dispersed at approximately 2.0 mL per leaf on the excised tomato leaf and at approximately 5.0 mL per leaf on the excised broccoli leaf in such a manner that the solution spreads sufficiently on the excised leaf. In this regard, the solution was dispersed on 3 leaves per condition (n=3). From each of the excised broccoli leaves and the excised tomato leaves, after dispersion of the spray solution of phage, the leaf-surface extract solution and the internal extract solution were prepared by the same method as in Example 2.

[0125] Additionally, an aqueous phage solution (10⁶ PFU/mL) having no organic silicone-based surfactant added therein was prepared as a control example, and evaluated in the same manner (Comparative Examples 4-1 and 4-2).

Evaluation of Residual Amount of Bacteriophage by qPCR

[0126] Using the same method as described in Example 2, the excised broccoli leaves and the excised tomato leaves were treated to prepare extract solutions (leaf-surface extract solutions and internal extract solutions). Using the same method as in Example 2, qPCR was performed on the extract solutions, and the residual amount of the bacteriophage was evaluated. As the primers for qPCR, the primers shown in Table 1 were used.

### Results

[0127] The results are shown in FIGS. 4A-4D and FIGS. 5A-5D. FIGS. 4A-4D relate to test examples including use of an excised broccoli leaf, as follows: a test example (Comparative Example 4-1) having no organic silicone-based surfactant added therein and a test example (Example 4-1) having an organic silicone-based surfactant (SL) added therein. FIG. 4A graphs the residual amount (PFU/cm²) of a phage on the leaf surface of the day 0 sample; FIG. 4B graphs the residual amount (PFU/cm²) of a phage on the leaf surface of the day 4 sample; FIG. 4C graphs the residual amount (PFU/cm²) of a phage inside the leaf of the day 0 sample; and FIG. 4D graphs the residual amount (PFU/cm²) of a phage inside the leaf of the day 4 sample. Additionally, FIGS. 5A-5D relate to test examples including use of an excised tomato leaf, as follows: a test example (Comparative Example 4-2) having no organic silicone-based surfactant added therein and a test example (Example 4-2) having an organic silicone-based surfactant (SL) added therein. FIG. 5A graphs the residual amount (PFU/cm²) of a phage on the leaf surface of the day 0 sample; FIG. 5B graphs the residual amount (PFU/cm²) of a phage on the leaf surface of the day 4 sample; FIG. 5C graphs the residual amount (PFU/cm²) of a phage inside the leaf of the day 0 sample; and FIG. 5D graphs the residual amount (PFU/cm²) of a phage inside the leaf of the day 4 sample.

[0128] The results of FIGS. 4A-4D and FIGS. 5A-5D are shown in the Table below.

TABLE 5

| | | | Residual amount of phage (PFU/cm²) | | | | | |
|---|---|---|---|---|---|---|---|---|
| | | | Immediately after dispersion | | | After elapse of 4 days | | |
| | Excised | | Leaf | Leaf | | Leaf | Leaf | |
| | leaf | Surfactant | surface | inside | Total | surface | inside | Total |
| Comparative | Broccoli | — | 6926 | 4423 | 11349 | 4340 | 2542 | 6882 |
| example 4-1 | | | | | | | | |
| Example 4-1 | Broccoli | SL | 14286 | 7483 | 21769 | 11754 | 5314 | 17068 |
| Comparative | Tomato | — | 19205 | 2005 | 21210 | 2904 | 1009 | 3913 |
| example 4-2 | | | | | | | | |
| Example 4-2 | Tomato | SL | 18637 | 6426 | 25063 | 10078 | 4142 | 14220 |

[0129] As shown in FIGS. 4A-4D and FIGS. 5A-5D and Table 5, the spray solution of phage (Example 4-1 or 4-2) having an organic silicone-based surfactant (SL) added therein, compared with the spray solution of phage having no such addition (Comparative Example 4-1 or 4-2), allowed the residual amount of the phage after an elapse of 4 days to increase both on the surface of and inside the excised broccoli leaf and the excised tomato leaf in the same manner as in the excised peach leaf. This indicates that, also for a plant leaf other than the excised peach leaf, the addition of an organic silicone-based surfactant can enhance the residual amount of the phage.

### Example 5 and Comparative Example 5

### Aim)

[0130] The effect of an organic silicone-based surfactant on enhancement of the residual amount of the phage is evaluated in a system in which a plurality of species of phages (the 2nd phage (Autographiviridae) and the 3rd phage (Myoviridae) used in Example 1) different in the genome from Examples 2 and 3 were used. As an organic silicone-based surfactant, SL used in Example 2 was used.

### (Method and Results)

### Dispersion of Solution of Mixture of Phage and Sticking Agent on Excised Peach Leaf

[0131] A spray solution of the 2nd phage (10⁶ PFU/mL) and a spray solution of the 3rd phage (10⁶ PFU/mL) as compositions for plant disease control were prepared by the same method as in Example 2 except that the 2nd phage or the 3rd phage were used in place of the 1st phage. The amount of addition of the organic silicone-based surfactant was adjusted so as to be a 3000-fold diluted concentration. That is, in the present test example, the spray solution of the 2nd phage having an organic silicone-based surfactant (SL) added therein, the spray solution of the 2nd phage having no organic silicone-based surfactant added therein, the spray solution of the 3rd phage having an organic silicone-based surfactant (SL) added therein, and the spray solution of the 3rd phage having no organic silicone-based surfactant added therein were each prepared, and dispersed on the excised peach leaf. The residual amount of the phage was evaluated. On the excised peach leaf, each solution in an amount of approximately 2.5 mL per leaf was dispersed. Under each condition, 3 leaves were used (n=3).

Evaluation of Residual Amount of Bacteriophage by qPCR

[0132] qPCR was performed by the same method as described in Example 2 except that the primers listed in the Table below were used. Using the day 4 sample after an elapse of 4 days, the residual amounts of the phage were measured from the resulting leaf-surface extract solution and internal extract solution.

TABLE 6

| Primer | Sequence (5′→3′) | Length (bp) |
|---|---|---|
| SEQ ID NO: 7 | GAACTTTCCACGGTTGGTGC | 132 |
| SEQ ID NO: 8 | CGAACGGATTACGAGCGAGA | |
| SEQ ID NO: 9 | CGCCAATAGCTCGGGATTCT | 135 |
| SEQ ID NO: 10 | CAATACGCAGAAAGGCGACG | |

### Results

[0133] The condition having the 2nd phage and SL, and 3rd phage and SL added therein, compared with condition having no such addition, allowed the residual amount of the phage after an elapse of 4 days to increase. This indicates that the addition of an organic silicone-based surfactant increases the residual amount of the phage in a plant leaf, independent of the species of the phage.

### Example 6 and Comparative Example 6

### Bacterial Strain Used

[0134] Tomato: Xanthomonas campestris pv. vesicatoria (MAFF No. 301256)
[0135] Broccoli: Xanthomonas campestris pv. campestris (MAFF No. 106765)

### Phages Used (Cocktails of 4 Kinds of Phages)

[0136] Tomato: 4th phage (Siphoviridae), 6th phage (Myovirdae), 5th phage (Siphoviridae), and 7th phage (Siphoviridae)
[0137] Broccoli: 4th phage (Siphoviridae), 6th phage (Myovirdae), 8th phage (Autographiviridae), and 7th phage (Siphoviridae)

### Test for Plant Disease Control Effect

### (1) Preparation of Sample

[0138] A spray solution of phage used in this test was prepared in accordance with the following procedure. First, the bacterial strain was inoculated into a YPG culture liquid, and cultured overnight in a shaker set at 25° C. to prepare a bacterial cell culture liquid having an OD₆₀₀ (turbidity at 600 nm) of approximately 1.0. Then, this bacterial cell culture liquid and a refined solution of phage (having a titer of approximately 10⁸ PFU/mL) prepared separately were mixed in equal amounts. The resulting mixture liquid was inoculated into a 100-fold amount of YPG culture liquid, and cocultured for approximately 8 to 12 hours in a shaker set at 25° C. The resulting culture liquid was collected. When the titer after the culture was insufficient, the mixing ratio of the culture liquid to the refined solution of phage in the coculture was fine-tuned, and the liquid and the solution were cocultured again. To the resulting liquid collected, a 1/10 amount of chloroform was added, stirred vigorously, and then centrifuged. The supernatant was collected in such a manner that the chloroform in the lower layer was not touched. Furthermore, a phage-containing solution obtained by allowing this supernatant to pass through a 0.2 m filter was used as a massive-phage preparation solution free from contamination of a bacterial cell. This massive-phage preparation solution was diluted with sterile tap water so as to have a titer of approximately 10⁹ PFU/mL, and adjusted so as to have an organic silicone-based surfactant SL diluted 3000-fold (Example 6). Separately, the massive phage preparation solution was diluted with sterile tap water so as to have a titer of approximately 10⁹ PFU/mL (Comparative Example 6). The resulting solutions were used as final spray solutions of phage. For the cocktails of phages, the massive-phage preparation solutions adjusted so as to have the titer of the same order were individually mixed in equal amounts, and then, resulting solution was used as a stock solution before dilution.

[0139] A spray solution of bacteria used for infection treatment of a plant in this test was prepared using several YPG plates, as follows: a bacterial cell culture liquid not (before) having the above-described refined solution of phage mixed therein was diluted approximately 10,000-fold with sterile tap water; and the resulting solution was spread to the plates, and underwent a solid culture for approximately 1 to 3 days in an incubator set at 25° C. Colonies on the solid-culture plates were collected while the colonies were suspended in sterile tap water. The resulting suspension was diluted with sterile tap water so as to have a final OD₆₀₀ (turbidity at 600 nm) of approximately 0.5. The resulting bacteria-containing solution was used as a spray solution of bacteria.

### (2) Plants

[0140] Commercially available tomato seeds and broccoli seeds were seeded, and grown in a greenhouse. A tomato seedling grown to have 50 or more leaves and a broccoli seedling grown to have 5 or more leaves were utilized as evaluation specimens. On each specimen, the spray solution of phage was dispersed on the leaf face before and after a bacterial infection treatment, twice each, at intervals of 2 to 3 days. For each spray solution, 8 specimens were prepared. Nontreated groups were as follows: in (1) above, sterile tap water was used in place of the refined solution of phage; bacteria alone were mass-cultured; then, the culture liquid underwent aseptic treatment, and was diluted with sterile tap water in the same manner; and the resulting spray solution was dispersed on the leaf face. As a result, the nontreated groups were substantially the same except containing no phage in the spray solution. In some cases, a plurality of branches of the same seedling was separated to two groups to undergo respective phage application. The bacterial infection was conducted, as follows: the spray solution of bacteria was dispersed on the leaf face; then, the seedlings were placed in a simple polytunnel the inside of which was sufficiently wetted with sterile tap water, and the polytunnel was hermetically sealed; and the seedlings were left for approximately 2 days at a humidity higher than in the surroundings. When some degree of disease development was observed in the nontreated group after an elapse of 1 week or more beginning from the infection treatment, the disease incidence rate in the case of application of each spray solution was examined. Bacterial spot observed in peaches develops a peculiar brown spot on the leaf face. Thus, the ratio of the number of leaves developing the disease observed therein to the total number of leaves at the time of examination was regarded as a disease incidence rate.

### (3) Test for Control Effect of Each Species of Phage

[0141] By verifying the disease incidence rate in accordance with the above-described method, both the tomato and the broccoli were evaluated 20 days after the infection treatment. In some cases, broccoli has a smaller total number of leaves (denominator) than a tomato, has a larger leaf area, and thus, has a larger risk of not having the spray solution spread on the whole leaf. Accordingly, with respect to the values of the nontreated groups, the disease incidence rate of the broccoli can be worse than the disease incidence rate of the tomato.

### (4) Results

[0142] The results are shown in the Table below.

TABLE 7

| | Excised | | Disease incidence |
|---|---|---|---|
| | leaf | Surfactant | rate (%) |
| Comparative example 6-1 | Tomato | — | 19.7 |
| Example 6-1 | Tomato | SL | 16.9 |
| Comparative example 6-2 | Broccoli | — | 25.8 |
| Example 6-2 | Broccoli | SL | 22.2 |

[0143] As shown in Table 7, it has been verified that the spray solution of phage (Example 6-1 or 6-2) having an organic silicone-based surfactant (SL) added therein was decreased in the disease incidence rate, compared with the spray solution of phage having no such addition (Comparative Example 6-1 or 6-2). This is considered to be because the addition of an organic silicone-based surfactant enhanced the residual amount of the phage, and thus, was able to control a plant disease.

[0144] The upper limits and/or lower limits of the ranges of values herein described can be arbitrarily combined to define a preferred range. For example, any upper limit and any lower limit of the ranges of values can be combined to define a preferred range. Any upper limits of the ranges of values can be combined to define a preferred range. Any lower limits of the ranges of values can be combined to define a preferred range.

[0145] All publications, patents, and patent applications cited herein are incorporated herein by reference in their entirety.

[0146] Although the disclosure has been described with respect to only a limited number of embodiments, those skilled in the art, having benefit of this disclosure, will appreciate that various other embodiments may be devised without departing from the scope of the present disclosure. Accordingly, the scope of the invention should be limited only by the attached claims.

The application's sequence listing, which the Patent Office published only in electronic form, follows.

SEQUENCE LISTING (18 sequences)

SEQ ID NO: 1 - DNA, 20 bp, synthetic construct
  source 1..20: mol_type = other DNA
tttctgagttctcgccccac

SEQ ID NO: 2 - DNA, 20 bp, synthetic construct
  source 1..20: mol_type = other DNA
gcggacgtatttccgctttc

SEQ ID NO: 3 - DNA, 20 bp, synthetic construct
  source 1..20: mol_type = other DNA
tttttctcgtctgaggcagg

SEQ ID NO: 4 - DNA, 20 bp, synthetic construct
  source 1..20: mol_type = other DNA
gtgctatggttcgggacttt

SEQ ID NO: 5 - DNA, 19 bp, synthetic construct
  source 1..19: mol_type = other DNA
tcttcgtctcgggcttctt

SEQ ID NO: 6 - DNA, 20 bp, synthetic construct
  source 1..20: mol_type = other DNA
ccgttctccttgttgatggt

SEQ ID NO: 7 - DNA, 20 bp, synthetic construct
  source 1..20: mol_type = other DNA
gaactttccacggttggtgc

SEQ ID NO: 8 - DNA, 20 bp, synthetic construct
  source 1..20: mol_type = other DNA
cgaacggattacgagcgaga

SEQ ID NO: 9 - DNA, 20 bp, synthetic construct
  source 1..20: mol_type = other DNA
cgccaatagctcgggattct

SEQ ID NO: 10 - DNA, 20 bp, synthetic construct
  source 1..20: mol_type = other DNA
caatacgcagaaaggcgacg

SEQ ID NO: 11 - DNA, 200277 bp, unidentified
  misc_feature 1..200277: note = the genomic sequence of a bacteriophage
  source 1..200277: mol_type = unassigned DNA
ctcgacgtagtttctgtctcgagattccggtgagatagaaagattgttctttcgtaccacatctgtagactagtggtatgaagatcaagaccctcctcgcagccgcactgatgaccgtcgcactttctgggtgcggcgagatcatagaagaatcagaaatcattcctggcgcagaagctgagatggtagcgatgtgcaatgtgaatggaggctttgttcgcggatgggttacaccgatgaacaaatactcagcaggcaaggtttcgatcctcgaacagtacaggacagcctaccacgttgaatgtgtcaatggtgcgaagattgacaagctgttcgaaggcaagacaatcagataatatcaacccaagactaggagttagtcatggagtcagcaatttacaaggacctcgaccctgaggtggcagcagagtgcggctacttcgaaccgaaggaacccttcaatcaaatcttctcgcagccttgggcgcgagctgcgatcagcgcatacgaccagatcatctactacccgggcagtttcggaacgttccatgatggtcacgtctcagtgatcaagcgtgctctgcgaaagtaccccggcgcctggctcgtgatcgcaccgagcaattcagactacgcttcccagaagtacggcgcatggtcggaactcgcatcgaataagcatcgctacgacaccatcaagaaggtgttggataagcatggcatcactgcctcgatcgacattgatccgatgctcaacaaccgctgtgatcagaacttcactgaccagctggatgccttcctggctgcgggtaagcgcgccggcatctccgacatggccaagcctccggtcatcctgtgtggcaaggatcgtgcggacttccagaacctcaacaactacaccgacaaggttatcgtcgagtggtttgaggataccactgggctgagcacttccaagctcgagaacaagaagcggatgaagaagcatctcatcctgcgctgcgtgaacgaggaagagttcaatctgttctgcgagtatttcgaagaccagtacctcaccatccagccgtattacctgcacgatgaaatcgagtctgccaagaaggcagctgtgatgattggggcgacccacaccaactgcaaggaatacgctggcttcttgccttacatcaagatcagcaggcatttcaagaacccgctcgagaacggaaccgtgaacaattggttccttccgaatgacgcggttctgcttgactcggacatctttaccggaaccacgcaggcttgggtagagtctatgggcggaaagctccatggactgatcaatctcaaggactggcacggtgtctgggagctcctggatatcagcgacttccgaaagaaagaatgggcgtatccctttacggatatctccagccgctgtagcatgcaggcattcgatactgcctaccacgaccacttcaacgaattcaaggaaaagctcagccatgtccatccgtgaaatcatctcgccgaacgttaaggccatccttgctcttggcatcgaacgcgatacgccttttgagcttgatgctctcctgcacaagaatggtgtcatcgaaatcaacacgtcgctcgaccttctccccgaagtggatcgcgcgttcgagattttcgaccagcttggtgctgtgtatccggtctcggtgaccggcctggaaaacgtggaaagcggcgttggttcgcatcgcttctgcgcgtgggatggcgaattcgcggcgctcctgaccgaggtggtcaagctgatggagactcctgaactgatccagattggtgatcatctctgggagtttgagagcgtctcgaagtatttccgtttcatgcggtacgatcagggcggtgaacatttcccgcactacgacagcgatttcgttgtctacgatcatctgaaaaccttcggacagtcggttcgctacgccacgaagtattcgctggtgatgtacttcaacgactgcgagtcgggagaaatcgctttcatcgacaatgatccgaacccgacaaagggtgattggaatcgtcaggcgactgatgctgagatctccttgcgcatcaagccggcaaagggaaagatcgttctcttcccgcacactctctgccacactgtgctccccttcaccgataaggacagccagcgcttcatcgtgcgcggcgacctgatcttcacccaggcataagacatgactctcgtcccggtaaaccagaacgaactggaaatgtcggttcggatgttcaagcacatgttccgaaggaaggatccgtatcagaagattctcaccctgaagaactacttcttgaactggaacatcaagaaggttgtagtgggcgtctcgggcggcgttgattcggcactagttctcttcctcctggctcatatcccggacgtcgaagtccatgcagtgacgatcgatttcgacacctacagcgatgtctttgaccagggctatatcgagctcttgcagctggctacgacgcgcttccgaaacgtgaagtggcacaagaaagatctgactctggctttcagcgagatgatggttgccctggacctcgagaaaagttctgatgaagtcttcgccaacaccagctatgcgatgcgttacctgagcttcttcgccttcgcgcaagcactcggtggcgtgaccatcggaaccaccaacctggatgagatgggctacgtgggctggttcgggaagaactcggatatgatggtcgacatccagccgatttcgaccctgcacaagttcgaagtaatcgagtgggcaaggctgttgggcgtacctgagcgtgtcgctgcccgcattccgacaggtgacttggtcaacggtaccagtgatgaagaaaacttcggctgcacctatgacgaactttctttctacacgcaccaccgtctcaaagacccggacatggaagtttcgcccttcatggaagcgcatttcgaaggcgtagaaaggttgcgaaagaaaaatctgcacaaataccagggccagaagttcaacccagtcttcctgtaaagaaagatttctcctgtattatttgtagaacataaaccgaactgaggttcagatggaaatcgcgctctggctctgcttgatcccgatcacgtgggcggcaatagcacatttcgcattcaaaaggacgatcacctggaaagaaggtctgctccagggtggtggtatcgccctcgtagttctcctgatctacggttgcatggcatacagcaataccgccgatcacgaaatcctcaacggacaggtgacgggaaagaagcagacctggaccagctgttcgcactcgtattcgtgtaactgctacacgacttgcagtggcacaggttcaagtcgatcctgcacccgacattgcagcacatgctacgagcactccaacgactgggattgggacgtcttcacgacggtaggtaacatcgagatcgatcgtgttgaccgtcgtggtagccgtgaaccacctcgttggactgcggtacagatcggtgaacatgctgcggtgacgcacacctacaccaactatgtcaaggcagctccgagcagcttgttcaacgtcaagctggcggaaaccgaggcaaagtccaaggctgcgataatccctcagtacccacgcatctacgactactatcgcgttgaccacaccattgatatccaggcaggtgtcgcgaacagaaaagcctgggatgcagagctggacgaagtcctgaaaactatgggttcggcgcgacaagtgaacgtcgtgttggtcttcgtaggcaagcaaggtcgggagtacaaagacacgttggagcgtgcttggctcggcggcaagaagaatgatgtggtgattgtggcaggcgtcacaggaaccaagatcgactgggttgaagccttcacgtttggcaagtcctccggtaacggaatgctcgccgtcaagatgcgcgacgagttgcagaagtacggtaccactgaaaatgcgaaggaaggcgtggctgtaatcacaaaggtgatcgcatccgacttccatcgtaagaacatgaaagactacgaatacctgaaggctgagggtggaccatcggcaaagcaagtttcctggctggttggtattgtcctggtcctcttgatggtgacaactttccttcttcacaagtacgacgtgttcaacgaggagttctacgacaggcacccgaacattcgctacatccgaaatagttttcgtcgttaatccaaaatcacataaacccaacaaaggtaattgataatgaacattcgtggcaacaagggctcggcgtggattgcagtgctggtcttcctgggcatcctggcactgggcgcagtcttcgctgtaggcagctatgtcagcgcagccaactacggcaacgaagccgagcagcgcctggaagcgaagtggcaggacaatcagaacgtgctgggccagtacaccatcaagatcggtgaaatggcacaggtgccggaaatcgcgcgtgatgacctgaaggaagttctgaaggcaacgttcgaaggtcgctatggcagcgaaggcgtaagccgtggtgctggtgagcagaagaccttccagtggttgcaggaacagaatccgaatctgaacccggaactctacaaccgactccagcagacgatggaagctggtcgtaacgagttcaaggtctcccagacggaactgttggatgagaagcgcgcctatcagacgaacctgggctatgtctggaagggcttctggatgaagctggcaggctacccgaaggttgatctgtcgaagtacaaggttgtggtcggggctgacacggcacagaagttcgagaccggcgttgacactggcgtcaagctgcggtaataagtagaagtatccgacgaggcgctccggcgccttttcggttgatacgaaaccatacatcgttataatcagcaaaagaaaggagttttcttatgcagcatgatctcgcagttttcatcgggcgtttccagcctttccatctgggtcacctccacgctattgaggaaggcctcaagctcgccaagaaggttctcatcctgatcggtgacaccggtggtcctcgtggcctcaagaatccctggaccgcagaagagcggaagcagatgattctggattcgctaggcacctaccagcgcgaactcgtgatgtttgacattgcatacgacatgccgtccaacacggaatgggctggtcagattcagagcattgtcagcaacgcctcgaactggcataagctgcccagcgtaattctgatcggtcacgagaaggacgcgtcgagcttctatctcaagatgttcccgcagtggaagcacatcgacaccggcttcgaagaactggaaagcggacttctccgcaagtacaacgccaccgacattcgcaagatggtctggacgaacacgctgcattacgcaacgggtctcctgcatccgaccacgctgacctacctggtcaatcacatcaagcacaacccagctatctatgaagagtttctcgaggaatacggcgccatacaggcttatcgcaaggcgtgggcaggttcgccgttcccgccgatgttcgtcaccactgactgcgtggttatccagagtggccatattcttctgatcaagcgaggcgaccgacctggaaagggtctttgggcgttgcccggtggcttcctggatcagaccgagtccatccaggatggtgctctgcgtgaactgaaggaagagacgaacattcacctgcaggatgatgtgcttcgccgttgcattgttcgcactttcgtccatgatcgtgcaggcggtgtcagtgaagaagaccgtggcagaatcattacgcatgtgcatgtcgtcaagcttgccgacgggaagccactggccaaggtcaagggcggcgatgacgcagccgaagcacgctgggttccgttgggcgaaatcaactaccgtgagatcttctccgaccacggaaagatcattgaccgcgccctgagtggcgtctgaggaattatcatgaaggacattatcaacggctttttcgaagaagcagaacgtttgcaggctctggcagaagaacagcgcagcaaggctgctgcaatcctgacacctctgtttgatctccagcatcggcttgcatggtctgttcattgtgagcccgagttcaaagaactggaaaagtggtatcgcaagccgcgtgataagttcgcaaccaatgcgaaccgtcagcattcttactacactttcgacggaagtttctacgatctctgtgaatggagcgacggtgactcggctgactccattgagctgcatcctatcttcctgacagatgcttctgaggaagagaagaaggaagcaattcgtcaggtatatcgagcagatatcgctgccgtagaaaatcagaagcaacgcgcgaaagaagctgagctggaaaaggctcgcaagcttctcgctgaaaacggtgtgtctttctaaggcacactgttagactataatcacaccaaacgtagaaaggagttttctatgattttcaatccgatccttgcaacagacagctacaagttctcgcacttcatgcagtacccgaagggtaccactctcgtcaagagttatgtcacggcgcgtggcagcaagattcctggcgttaccgcagtggtttgtgctggtctgcaaatcttcattcacgaatatctcagcaagcgcgtgaccaagaatcacgtcgatcaggctgaggcattctgtgccaagcacggcgttcctttcaaccgcgaaggttgggacctgatcgtaaccgatcacaacggctaccttcctgtcgagattcgctcggttgaggaaggtacgcctgtgccgctcaacgagctgatgatttccgtgatcaacaccgacgagcgtttgccgtgggtgacctcgtatatcgagacgctcctgctgagctatgtctggtatgcctcgactgtggcaaccaagagccgcgaaatcaagaaggtcatcaagcagtacctggacctcacgtcggacaatgctgatgtggaacttccgttcaagctgcacgacttcggttaccgtggtgcaactcctggcgcagctcatgttggtgccttcgcgcacctgatcaacttcatgggtactgataccgtcgccggcatcgaagctgcaatggagtactacggttcggatgtctgtggttacagcatctcggcttcggagcattcgacgatgaccagttggggtcgcgatggtgagttcgatgcctaccgcaacatggttgactcctacgccaagcccggtgcgatcttcgcctgcgtgatcgacagctacgacaccttcgcagcaatcgatatgttctgtgaagaccgttgtgcaggtggctcgctcctggacatcgtcaagaaccgcggtgcaaccatcgtgctccgccctgatagcggtgacccgatccagatgccaattgacgtcatcaagtacctgatggaaaaggtcggctacgagatcaacaacaagggttacaaggtcctgccgagccatgttcgagtgattcagggcgatggcatcgatattgaagacgttgagcacatcctggagaccctggtcgaggatgaaaagatcagcgcctcgaacatcgcatttggcatgggtggcggactccttcagaaggtgaaccgtgatacgttcaagtttgctatgaaggcgtgcctggcatacatcaacggcgaaaaggtagacatcatcaaggatccggtcactgaccctggcaagaagtcgaaggcaggcgacctgagcgtctatcacaatccggaaactggagagtggaagaccatcactgaaggttcgctggattcgttcgctttcaacaagccttcgagcaattggtatcgcaaggactatgttgtctatagccactacggtcgcgatactttcttcgactatgtggacatggatactgttcgtaggaatgctgctctttaagggcagcttccttcataattactatggtgagatgaatgattctcaagagcgaaatcagaatgtccaaggctgaaattgaaagcctcatccttgatcacctgaaaaataacaacaagcacaatctcaagcttggtcgggtaagcttctctgttcgtgagtctgacgaccactatggtggctacactccagctgatcttgaaggtgcaactatttctgtggaactggagcttgacgatggaagagaggatcgaagataagattttggcttatctgcgtggcgaagttgactatgatgcacttcaactgctgcgtgatgcaagaaacgagatcgaaaaactgagagcacgtgctgttgatcttagctgggcagcggacgttgccaatgaccgtgcagatgctttcgatccgaggtacaactaatgtcactgaccaacctgttttcttcagggattgaataccggaagcgcgtcatggtgctggtcaccaagcgcatgctgaatccgaaacggggtggtggagtctctacgtttgtgcgaggcattgctaagtctatgcctgacgacacactcgtagagattcattgcgttggatcagataatcttgatgtctatgagattgatcatccgaatgtcgtgacttatggttatcctcagatggtgaagatcaaggcagaggagccaggcatcttccagcgcatcatgatcaacttcgatcagatcgaagaattccgccacgccttgaacaagtcggtgttcacggaagagaagctctatgatgcgattgtgactacctgtcctgagtctgcattggcttgcatttccttcggagcgatgatcgaaccattcaatgtcatctataccacgcatcacggcttgatgtctgacagcctgagcaaggttcctttcgatgacgctgtgatctacttcgccaacgaagtgattccgaagtctggatttgtcaccaccgtgactcagactcctctgaatgctgagtggctgcaggaaaagcatggtgtcaaggttgatcacgtgattcctctgctacctgacgagcttcctccttttgctgatatggcaggtaaggaaggcgcactgttcatcggcaagtacgagactggcaaacgacctgagctctttgtcgagatgtgcaagcagactggcatcaagggtaaggtcatgtgcggtggtatcaaagctcccgacgcatggcacaaggctttcaaggaagctggagttaccaactacgagatccgtcagaacctgcaaggcaaggaaaaggaagatttcatcgcatctgcgaagttcactttcgtttcctcacagaacgaatcgtacggttaccttgcactggaaggtctgttcaacggtcctaccatgattgcagacagccgatgggcgaagttctgggaaggctatggcgcaactctgtttaccaaaaagaacatggctgaggtggctaaccgtctcaatgagatgactctgtgggacaacaccaagctggtaaagatgctggatgatgctgagaacaagtgggttgacgtgatctgtaatcgaaagaattacaacaccaagcctaactcttcgatgctcaaatatgtgacgccggaatggcagactcttgctgacctagcaaaagcgcgcgatgttcgtagcctgtcgagcggagactacaagcctctcttcgaccactgcgagatcgtccatactgataatgaatcaaaggtgagacgtgtctgatatcactgtaggtgaaatgaagaagtggcttgagcaatttgctgatgacactacgctgacgttcgaaggaaacttcggaccaggcttgcctcaaattgatctgaccaacgatcaattccagtataactcatgggaggcctggtcttactcaccagccaggcagccctggacttatacgcctaccgaggaagctaagtcgagaggtaatacgactaagacctacccatatcatcctgcgaacatcacactcggtgaacaatcgtgaatgacggcaaagcagttacgcctcaagaattgaaagcgtggatgttcaagttcttcggtgatcactacggccttcttgagtgtaagaaggcccttgccatgaatgaaagaacgagtgacgctgtaaagtggctaatcaaatcagacctgtttcggatctgattcctagcatccctgtttacggatgaattaatcaattacaatccttgcatgaaaattgtccaatttaagaacggtaggtttggtgttcgccgaggatccttctgggattacggttggtggacacatcaattcctagattatgaaggtacctgggtaaagaagcagggatacaatatcggttcagtggaatgctattccaaggaagaagctgaaaggcgactcaaggattacattgaatcggaagcttcatatcaggcctttaaggcatctgcaaatgatatgggcaaaccggtaaagtgaagctacatcgtcacgactaatccagtgacgcaaattatatgatgaacaacaggttgtccaactagccgtcggctaagcgtagtcgcgacgtgagatagagtgggcagggcgagcaatcgtcggaagtgcgtaatgtgagaataaggaaccgagaggttctaaagtatgacctgctctgccacacggcaacaggtgttaggcaagttgattactaactgaattcttgtctatggcgtgaatcccgcaaagggaccaaagtgcaattatagggcgataccgttcacctcgtcctgctgggaagcagattgcaagtttgagtggtgatggtatggacgcagttcccttttctcatcgtcgcacttttggtggtaatagccaaagtgtggctccaataaaccgcaattcttttaaaaacatattttatgaatcaatttcgatatgcaggtataggatctcgtgatactcctgtctccttaaaacaaacgatgatggacatagcttacttcttagcgtatgaagctaatgctattctcgtatccggtggagctcgaggtgctgattcgttctttgaggaaggatgcgatcgtgcaggtggtaacaaagagatctggttgccagaagcaggcttcaatggaagcaagtctaagttgattggtgcatcgaaggatgcctatatcgtagccgagcgatatgttggtcattggaagaactgtaaggcatgggcacgagcagcacacgcacgaaactgtcatcaggttctcggtgccgatctcctcactcccgtttctttcgtagtgtgctggacacctggaggtgagagagttggtggcactgctacagcgatttctattgcagaagataagggcattccgattctcaaccttggatcgaaagactggtctgagacagaaatttctgattggctagaaatccggctaaattgacctttctaggtactgtctgtagactgtatggactaaggtgattaggagttagtcatgggttacggaacacgtccgaacgatttcggtggaaacatcagaactttccagcctgacaatacgaaagatgtgctgtacatcgacacgactttttcgtcggtcacgttgaaggagatcatggagaagatccgtgaacacttcggcagcgatgatatcgagaaattcgatatcgaggctcagtacatccacacggattgcctgggctacgactgttatgaccccggcgactactccagcttcatcgtcatcactcgcacaggaattctgtaatggctgctcgattcagtcgtcacgcgaagcctctctaccgtatcaaccagcacggtgagctctacaaggcgagtgaagaattcaagaccaccatccgtcgagccggagtctggaaccgccctgcatgtttccgttggtgggctgaaggatgccgagagatcaacacctgggtattcgattcccagggtcagcatcgtctcattgtcggatacgatcctgagactgacctgttgtatctcggacgcaccatgaccgaagaacgccacctccccaaccgttttaagaatcgagacatctgatgactgctctgctgattggctccaacgcacttcgcgcacacggcatcgctgttgagcgcaggaacctggacatggacttcattgctacgatggattctatcaaggcgatgatcgatcggaacaagacgcgcttcgtcaagattcagcacagcgaagatgcgaaccatctgttcatgttccctcgtaatgggaacgacgccatcttcgatatcgaaatcgcatggctcgattctgtcagtgataccctcattgacatcgtcctgaacaacggtctctacaagatgaccgaggagggctactacgccgtttctccgtcggttgtgctggcactcaagctgtcgcacaagtacaagaaaaactcgcgtcacttcctgaaaacgatgcgtgacattcagatgctcaagggacttggctacaaggttccgaagtgtctgagtgagtggctcaaggatcgcaagaagtggacctacgactataagcatcccaagttggaaggtggtgtgaccaaggctgacttcttcaaggacgatggcattcgctacgtctacgatcacgacagcatccatgaagctgtgcgtcatctgaaaaagcctgcctatcgctacttccagcctgacggtgaggaagtgggcacgtctaaggaagacttcttcgctcagccgcgtgaggtacagcttctggcagtcctcgaggaaagctatgtgctgagtctcgagcgcgccattgttccgttcaacttgaagactatcgagcagcggaagaaggcttttgacactgctctggaaaaggtctgcacgagcatcacgtctggttggttccggaagtttgcctgggataactttgacgaagtgaatgacctgtataatcaggaatatgtggaccgcttctggcgcgaagtcgaaagcggcaatgtgaagccctacgtgaaggaagaaaatgcttactgaaactgcaaaggcgtctatcatccaaaaggtcgaagagatcaaggcgctgatggatgaagcaaagctgatcgggcgcattgacgtctcaggtcgtgatgcttacccaggcgatttcgtgatcgacgagatccgcaccattgctccggcgggctctgagcactggtcgcacagttcgtgctgggatgatgaacctgccccgtacgatcctccctcctggaatgcgagtaactgctaatggctaaagacaatttccaagaacgagtagaactcatcaagctccttgtcaatgaactggataaggaactgactgacctcaatgtgaagcacaacgtcgattacaagatcgacctgcaagtccaagacgaggacggtaattatatcctcggcgcccaagaatccagcgactggaacgcgagttggtgctgatatgaaggacgcctggtttgaagttgtaatgggtgcttctggagcatcactgtatgtctctgatgaagatggcaccggtcatcgtctttctggaagtaagccctggggtggtggtcatacagcacatcgcttcaaggtgaacatcgaggaagcaattcgtgaactagaagccctgcgtgacagggaagaggaagaggaatgatcagtccgtgtgatggtggcggaagtgtcgacccgggtcgcgccaagtttgaggaagctgtcttccggcagtatttcatcaagcatgttggaagtgatctgaggatgaagccaggtatcgtcaacaaggctgagttctgcaagcgggacgaaaatggtaattacgtgcgcgaagaagtaagcgcaatgtggtttggttggaaactttatcagaaggaaaacgtgtaatgaccgtcgagaaagaacgtcatcagaagatcgccgcactcctggacagtgcttccaagcagcttgaagaggcacgccagttggcaggcaacgacacctatcactggtctggtcctacctatggtatgggtggctggatcgagtctggcgaatggcaggcatctagccattcttgctgaggaatgagaaatggaatacgctgattttgaaagccgtaagaagcgcatcgagcagttgattggtgaggctgagggcctgctcgaggaagctcgagaaatgtccgatggtctctttgatgaaggcgcaacgcgttcctggcaggcaaagccttcatttaggtttgaaggcccttcgtatggtatgggtgggtcgctgcaggatggcgaatggtttgcatcgagccaatcgtgctaaaaagagtgaaagggtgggacattggcacttcggtgcctttgtccttttaggtaaaccaaaggaatatcatatgcaacgtgacttcatcgaaacctggtctggcgtcaacctctacatgcctgacccggatccagaatccatcctaatcgaagacattgcgcacgctctgtctaaggtatgtcgtttcgccggtcatgtggatcgcttctactctgtagctgagcactccatccacgtctcctatgctgtaccaccggaacatgccctccaagcactgctgcatgatgcaactgaggcttacctgtgtgacattcctactccgttcaagcggatgattcctgcctatgcggaactggaagacaatctgtgggcagtgatcgctgaaaagtttggcgtgccgttcaaactgcacgagactgtcaagctggcggatcgaatgctgctcctgtcggaacgtgatgcactcaaggaacactccaagcgccaatggcctgcggaatacgagaaccatcgtcgttgggaaggcttctatgaaatgaacctgacccaggaacaaactgctcgtgtcttcctcaagcgatttgcagctcttcggtagagtaaatactgggaagtaaaccccaacatggaattgaaatgagtaccgaagaaaaagtgagtgtgctgcctctgccggaagatcctgcttacctccagtggctgcgaaaggaaggctttgaactcgaaagcactgtccctatggaatcagacagcattgtctgggttcgtaagacaaagtatggagtgccacgttgtttgatgaatggtgttgtccttgtcgagatcgtgaagaccggagaccagtttagcatgggcgttcgtgcctcggctaagaattactggggtgcggcttccatctacggcattgatgaagagaaccttgtcaggctgggacgccagtacgaacagcgagtggtggacgcatggcgggaattgagcgcctaagagaacagattgtcgattaccttatcgcgaataaggaggcaatcttgatgacgcagcagtctcagttctgtggaccttgtggtggcatgaaagtcaccacagtctaccgtaacccagattgtggacaaattggagtctggcttgatcaatacagacgagaaacgggcacttgagccccgagatcgagagtacatcattttcgttctagatggagcatacgctcatggtgaaagtctatctgagcacctgcatctattcgacgaatttgagatcactcgtgcacaacgaaacgaagttatcttagcatccgactttggtcaagatgaggatcttgtttcagcaatcactttatttgggtgacctatgtcttatacttttacggacggcttgaaagacgtcatcaacggtaatttttcaaacggtggtgagtccaatcgcaggtacgaaatgtgcaaggcttgcccattgttcaattctgtcgtgctcacatgtggttcttgcggatgcttcatgcctgcgaaaaccaaactcgttaacgcaacatgccctgagggcaaatggtaaaatgacctaccgagacacgtatttcttcgacctgtgccgtgaggctgggttcgacgtaaccgatccgcatgattgggtcgaaatgagcattttctctaaggaaatgctgatcgaagaatcggaagaagactgaggcttgttctttcacagtgaatctataaactatgatttgtgggcagtgtgccccgaggtgaaatgaatgttcaagtgtcctgtttgtggtgattactccaattcggctgcttcattggagtcgcacgctgcttggaagcacggtcgacgcattcgagctgaaaactatcgtgcgccatcgtatgatatgacaccgtcaagtactggtgacgcacttgttggtttggctgtaggatatgctttgtcatcgatgtttgattcatcgagtagcgattacagttcgtcatcgtcggattggtccggtggtggcggagactctggaggcggtggcgcttccggggactggtaacaagttgtaaagatatagtggtatgaagccaatcgaaaggttgcttggacgcgggttcgattcccgccaggtccaccaagaacacatttgatcgccttagcgggctttctctagtcagagcggatcgtccttcggtgtctgacaagatgggaagcgtgggcaagagtaagatgacgtgagcaccacggcaagtgtgttgttgatgggcctgcccaggtttcgacaggcaggtaattagaaacgagcagaccactgttgagagtatccactcaactgaataaagatgcaaactagctaaatgtcgctgctaacgacgccgattactccgtagctcgctacgcctaatcgctcagtcctcgcccctactgagttcctcattggggcccctaatttcattcttcgaaagattaaatacgaagaaaaggcacacgaacaatgactgataacgaacaaccaaagcagagaatcaatcctcgcatctacggatggttgtccgatatcatgacctgggtcggagtgctgttccttggtgtcatcctcggcagcgcaatcacgcagtcgattgccatcaaggaccgtgatctgttggtttcatcctacacccagacgatcgcaacaaaggatcagttgattgaatctttgtcggtgacaacggtgaaggctgctgacgtagctctcaatcagagtacgactgaggtaaccaaggcacttgatacaatgtctgagcgcgataagacgctgcgcgacattgagaagcgaattgaaacaaagcagcgccaagatgcagcaaagaaggctgctgaggagcgtaaactgcgaggtctcaaatgagaattctcgtcctgttgttagcacttgttctcgctggatgtaagcacgttcctttggatttgacggaaccgtgttatgtgccacaaaagaccaccgagtcggttgatgaagctgtaaggcttgccaatgaccgtcacgatgctcttgtggagtgtaatgcgaaactagaaaagatcagaacgatcttagacccaaaggccagtcaatgagttttgaaacgtacctgaaagaatcagcagcagctgaggaagcacacaaactgggattgtccgcagccggttatggcctttggcgcgacaagaccggtaaggtggtgaagaagaccgtagatgataaacttgtggacgttcgtggctctgaggcgaacctgaagcatcatcacatcaacattcctcagaaccgtgaaggcaaccatgcagagcacgatcagtcttcggacattgtctctgcacatgagacacctggaacattccgcgaaagcgaagtgaccaagtatcacatcaacgaacactctgcggtacatcctgacaaggctggagagctgcacaacgcattggttggtgcaggctataagcattctccttcagcgtttggtcagatgtatcaaaagggtaagacctcggtgatgatctccaaccgtccagagattagcgcaaagcgcggcggaaagaacgatcatcacagtgttctaattcgtaccgatcatgtggcaaagaagaagcctaagaagtaaacctttgaggatttgattatgagcaggctggaagattttgttatgccggtagggaccgaagagattctcttcattgatggcgagcatcgtgtggtaaagatgaccgtcattgatcgccgtgaagcaggtattaatctgttccacaattttcatatccgtatgttgcaggatgcacatttcatctatggtttgaaaaagaaagaggttctaaagtctcgttggggtcacatgacacctgatgaatcttttgaccttgctcagtcacttagcaggatcgcgctggacctcggtctggtagttggcaatggagtgagaatttaattatgtgcgttgtttcgatgattggtgactcgttccaggatcgttggaaggatcgtcttccgaatgattggaccattccggcaatgccgatgccttcgcagcctatggcacctccgttcaaggagcgccgcattgatgtatcgcatccgttccaggcgatcagtcgcgttgagtttgacctcctgaaaaaggaagtcgaaatcatgaaggaccttctggagcgtgctatcaagtacgacaaggacaacaatgagcctcattgcgagacggagagcaagatcgcattcctgaagcaagtggcaaaggctgttggcgttgaccttgaagaagtcttcggtaaataacaatgaagagcttttttgacgaacagggtagcttcaatgaggacgcccagcagttcacaaaagacgcgcaagagatcctaaggccactaatgcagaaatatgccggtgccggatttagctcgcgtgaaatagtttacctcatttcagatgtggcttcgattgaagagatctacatccgccaggtaaagagaatcagagataagcgtccttagatcagttggtagatcatctgctcgacacgcagaaggccacaggttcaagtcctgtaggacgcaccaagttttgccttagtagagaatggtatatcgggcttccttaaaagtcgccgtcattgtcggttcgagtccgacctaaggtaccaccttcataagcgcccaggggtgcagagagtttcgctagtatctcgctgcaacgacgtttattgaaggaacatgactagcacagaattcgcctcagtagagaattggtagatcggctccgctcaaaacggagtgtcattgtcggttcgagtccgacctgaggcaccaagatgacaaacgaagaaaagatcgctgcaaaggcagcagaagtagtacactacgaaggagtccttgaacgttacggttcgggtcgttggcttgacatgggtcgccgtcacctggctgaattgaacagggaacttcaagagttacgctctcaaagtattgatggtgatacgccgccctcgtaacgcggataagacagttcaagtctgtctgagagcaccaaaacctggctatgtgggtgagcggtttagccgacgtcctcataaggcgtttcacgtcagttcgaatctgaccatagccaccaattgaaacgagccctgttcattcagggcttttccttggctggtcaggtataagtccttgatactctattgttcatagtgggtgtcctgtattataaccactatagcttgtgggtaaataaaaaccccgtcatattgaggaagtcaggtgtaaggcatgggcagaaaagaaatcaacgtaacaaagagaaacggcaagcgtgagccgtatgacgtggcaaagattcagcgccagatcgaatacgcatgtgatgggattgctaatgtatcgcagtccatgattgaactctcgatgaacctcgagttgtttgatgggatcaagacatctgacattgatgagctggctatccgagcagccgtgaacctgatcctcagcgaagagggtcacaccaactaccaatacgttgcgggtcgtctggcatcatacgctctccgcaaggaagtctatggtcagtatgaagtgccttcgctgttctcgattgtgaagaagaacgtagccaagggcctctactcggatgaactgctgacctggtactcggaagatgagtggaacctcattgagacctttgttgaccacaccaaggatgaacgcttgtctcatgctgcaattcagcagttggtagacaagtatctggttcgcaatcgctccacaaaggaatacgttgagacacctcagattcgctacatcgtagctgcggcaacggcaatgcacgctgagcctgcaaagcagcgcatgaagcgaatcaacgaatactacaagcaggcttccaatggcgaattcaccctcccaactcctgtccttgccggtcttggcacaccaactaagcagttctcaagctgtgtcctacttcgttctgacgacactcttgactctatcttcgcaactggcgaaatggtggcaaagtattcggcaaagcgagctggcatcggtctggagatcggtcgtctgcgcccagccggtgcacctatccgcggaggcgagattgctcacacaggcttgaccctcttcatcaagaagtggttcagtgatatgcgtagctgctcgcagggcggcatccgcaattcgtctgcaacgctcacctacccgatctggcactacgagtttgaggaacttatcgttctgaagaacaaccagggtacagaagagaatcgtgttcgtcactttgactactcggttgtcacctgcaagtacctatggaatcgtttccgtaatcaggagatgatgaccttcttcgatccgaatgaagtgcctgacctgtacgaagcatactaccgtgatcaggctgagtttgttcgcctctacgagaagtatgagaagcaggatggactgcgcaagcgccagctcaatgcagcagatgccttcggtgcattcctcactgaacgctcagacaccggtcgcatcttcgaggtctacatcgacaacgtgattgatcagggtccggttgattctcagacatggcctatctatcagtcaaacctgtgtcaggaaatcttgctgcctacgcgtccgttccagcgtttggaagatgaagaaggtcgtatcgctctctgcactctgggttcgatcgtgctgggcaagttcaagaagcctcaggatatgcgcggcgcatgccgtactctggttcgcagcctcgacaacttgctgtcctatcagatcttcctgtcaccgcaggctgcgaatgcaaatgaagacttccgtcctctgggcattggcatcactgacctggcacactggcacgctcaacgtggctacacctacggtcagcctgaagcacttgctgagtttgcaaagtggatggagcacattcactactactgcatcgaggcttcgattgaactagccgaagagcgtggaccgtgtaaggaatggaagaacacttcgtatgcagaaggcattctgcctatcgacaagcgttcaccaaacctggatgaagtccacaagattgagttgactctggacttcgatgctctacgtgagcgtgttaaagtttcaggcatccgtaatggcctccttcaggcaacggctccagttgaaagctcgtcggttgtggttgattcgtcgaatggtatggctctgcctaaggcactgatctctaccaaggaatccaagggtagctcgctcgtacaggttgtcccggaatacgagaagctcaaggatcgctatgaaccacttctcatgtggaatcagcgagactgcgttggatacctgatgacggctgcactcaatcaggcgttcacagatcagtcactgagtacagacaccttctacaatcctgcgttctttgaaggcaacaagattccggcaacattggttgctaagaacatcatgaactaccatcgctggggcggaaagactttgtactacagtctgatgaacaagcgcggatcgaaggatggtctggaggaagtgaaggtagaaacagtcgttgaggaggtcattgcagatggagaagactgcccagcatgtactctctgagatcgattggtctacagtaagcattggatgtcctattccaggtggcgcacgcccctggactcaggaggaaagagataggcttcaagaggcgatgaaacagatcatcgcccgtgaggcagaaatgagagctcgtggagagattgaatgagtcagtttgatatcagtacagaaaccaactaccttgaccgcaagatgttcctggatggtactgttaccatgcagcgcttcgacaaggtgaagtatccgaagatccagcagtatgagaaagtccagcgcggattcttctgggtgcctgaggaaatcgacgtcaccaaggatcgtcaggacatgaaggctgcatctccggcaggtcgacatgccttcaccagcaacttgctgcgacagacgacgcttgacagtgaacaaggacgcgcaccgctgcagattttcggaccggttgtgtctctacctgaaatggaagccctcctgtctatctggggcttctttgagacaaacctgcactccaacagctacagccatatcatccgcggtgtctatccgaacccaggcgaaatctttgatcaggttcaccagaaccaggagatcattgatatggcagcaagcattggtcgctactacggacgccttgatgatttgaacgttcgtaaggcgcgcggtgagaatgtagacatcatcgagcacaagaaggcgatctggatggctctgcacgcatcctacgcgctggaagcaattcgcttcatggtgagctttgccacttccttcgcaatgatggagaacaagctcttcatcggcaacggtacgatcatcggaatgatcctgcaggacgagcttctgcataaggaatggactgcctacatcctgaatcaggtgtgcaaggaagatcctgaattcgcaatgatccgcgatgaaatggcggaagaagtctatgcgatgtatgaagaggtcatccaggaagaaaagaactgggctgtgtatctcttcaaggaaggtccaatcattggcctcaacgtgaagatcctccactacttcgtagactggactgctaaggaatgtctcgaggcggttggcatcaagtaccgtggtgaggctcctaagtcgcatccgattccgtggttcttgaagcatgtgaagcaggagacgaagcagactgctctgcaggaactggaatccaccgactacgtaatcggctcactgacgagcactattgactatggcgacctgcccgtactgtaagaaggaagcaacactcgagacgggtgaaacgatctacccacaccgacctgacctctacacgctctacttctgggcgtgtatgaagtgtaaggcgtgggtaggttgtcatggaacgtctcagatatcaatgggaagactggccaatgcatcttcccgtaagctaaagtccaaggcacatagcttcttcgatcccatctggaaaactggctacatgacacgcacacgcgcgtatgcttggcttcaaggaatgacagggctctcagcagatgactgtcacatgggaatgatggatgatgaaatgctgaggaaggtggcaaagatgtgcagacaatttttacttgaaacaggaattagaaacgatgtatgagatctactcgaaggacgcttgtccgaactgtgtcaccgctgcctcactcgcagagtcgaagggcattgaattcaaagtcttgaagttggacaaagactacacccgtgaagacctcttctcgaaggccccttcggctcgggctgttcctcaagtctttaaggatggtgtcctgattggtgatctggcggcgtttcgtcagcaccttgtaagtgtctgattcttggaaaactgacccgaactgactctatgagagtcagaaattgactcgttcttaacatctgcgccgtttggttcagattggactaagaacgggtcaatttcttgtcagagcctcgtgaagagagcctcagaacccttgatacctctagcaatgaaaaagaaatgaagattcaggttgtgccttaacgctaccttcattaacattcgattgtggtcagcgacagggctcagaaaggccagtcggactgatcgaggggttccaacatggggacaacatgaagacacagaaagacgcgatcaggcgcgagctgttagatcgtgcgacaggtaaaggtagagagccgacgtgggacttggacgtcgagccgaccaaactggaactggtcaaagcactcaacttctactcggcaatttcgacgccggagacactcaagaaatatgctattacgtgggcgagaaagaacgccccggaacgccttggggtcgtagaagcccaacccgatttcaagttccagacgttcggtgcgcttatgcgtattgaaagccgcggaatgaagcttccaaaggcagagaagaattcgattgcgaaatttgtgaacgaacttaatatgcctttcaccgaaccgaaacaaattaagccgaggaagaaaaagatgtcgaccgaaaacgtgaactaccgcaacttctgcgacgccctggacaaggccaccgaagcgacggagttcgtcaagcccgatctgaccgttgatccgaaacattcgacggcgtcggtgatcgaaacctgtcagcgcgagctggaagcgatcaaggaagacggcgacatctatccgaagcacatgacgcagtggttcacctacgtcatgaagctgatgaacggcggcaagctgccggaaaaggcgccgaaggaagtcaagaagcgggtcgaaactgtcgtgaacgacaactccgacgacggtgatgacgattcgactccgactcgtcaggcacgcgccccgcgcactccgaagaaggtcgcgtctgccaagggtcccaagaccccgactctcccgaagaacgatccggtgccggctgctgaccacgttctcaacggaaagaaggtcgctttcctcttcgacactcgctacggccgcctgacccggatggtctcggattcgaagaacggcttcgagatcaagggcaagaccatccacaacatcgaccactccaagtcgaaggtcgctctgctcaagaacttcggcgacgcgatgcagcccggcaagaacacgaccgacgaactggtcggctggatgagcaagtgcgtcaagaagggcaacccgatctcggtgggcagccgactggcagaagaagtcctggtcctggaagccgcctaaggcacaacggccctagggagaaatctctagggctttttcattggtcggagatcgtaatgagccgttgttcctgtaagaccacgacgcgcgaaatgacctactcggagttcgttgcctgggcacacgagtatgtcactgagagatttcttgtcggtggcctcaaggccatgcgcgacgcgatggaaatcgtcgtccagcagcagtccatgaaccattcattcaacaagggaagcttcccgaaggcggacaaatgagcatccgtagttggtggaagaaaaacgtcaccgaaccccgtcgtcggaagaagttcttcaaccttcgagctcggcatggctcgtccactcgataccacttcctgatggtcaaggaagccctcgaagatctcctgtaccgtttggattccaccggaactgtgtctcaccccgaagccggaatctgtttcaacgcaggcttccagattggcggggattggcgtgatgccggtgagaccttcctcagcctggcagaaatgttcaactctgaggttcgaggcctcaagaaaaagttcacgttcttcaccgacaatttcccgttcgaagacgtcgacgccctcgatgggttttctctgaacaagtgggttggtgagtccctgaaggtccggcgtgcctgtatcgaatggatcctcgacaacatcgagaagcatcaactgcaccggggttaaatatctcgacacatcaatcgagaacgaaacgtggccaaggtaccctacgacaaggcgaagaaaattctgaccactctgtaccaaacgggaggacaggtttctcgtgatccggtaggtcagaccacgccaccgaagggatcaaccgtaccgaagtccgtcatccaagcggcaacgccagaaaacaatctgagggtgacgaagcagccacgcaggaatgtgatcatcatcacacccttcatggcggaagatccggctttggcagagaagatgaagaggtacgctgctcgagcgactaaggactcgttgaataagaacgaagccccgctcgcatcacacctgttctactactcagtcttgaacgaaaaggatccgattgaacgagacattggcctccaatctcagctgagttggctcaaggttgcagacgtggtagccgtgtatgtagacttctccgtaacacctgcaatgaaagtggcgatcgacaacgctcgcctcctacagaaaaagatcgaattccgaacaattggagcagtggcatgattcgtgattacaccaacttcccgcaccgcgcaggcgatgtctatcgactgggtgagtcgaacctgtactacatcctgtccattgtcgaaggcgactcggtcaatgacgactggctcaagtatgccctgatcagcctcgacggcaaccgttggtgcgagcctatcgcacttgaccgttctaatgaactccctgctgacggtctgacggaagaagagttcaccgcccttgtcagcgcagaggaccgagaagctttcgtcaaggcttcgggcaggctggttttcgcctcgctccactgacagtccaattcggaccaatgctggccaatactagcatgtgaaggtcagcgtgaaatctgacagtctccgcagccctatgaccgtcagacttgttcagatttcaccgggtctgacgtaagtgtctgattctattggggttctggttgtgaaggggtaccacgtaagtgtctgattctattggggtcgtcacacatgaaggtagcgtttacagctcgtgacgggctgacaacgaaactttaacgagtctcttcacaagacccggagttctgatacagtgtctgacaatgatgtagagaggacgtgatcacctgtagcatgagtcttgtcctattccggactctgttgaggaaatatcatggctctttatgcaatcaagcacatccctaccaatcgcttctacactccaaacacctcgggtgctttccgcaccggacgcaactggagaaagggaaaaggtgtattgtttacggacaaggctgacgcggtgaatgaagtggtaagcctgatcaacaagcatcgtaacggtgaagagcagcttcgcattcgtacctatggcggatacgatgttgcacgcgccgaggatgcagttggtgatggatacattcgtgatcgcgatttcagcgtagttgacgtgaacgtttaagtttcctccgtgtggcgcactggccaaggatggccacctattctattccttgagaacacgatgacaattctttcgatcctcaatcaactggctgcgacttcgagccgcctggccaaagatgcaattctcaaggacaacgcgtccaatgagacgctcaagcgagtgttcaagctcgcatacgacaagaagatcctcttctggactcgtactatcccagatgaagccagctggtctgacgatcctcccttcatcaatcttgacggtgcactcgaccagatcgagaagaacatctgcacacgcaaattcacaggcaatgcagctgctggcttcctggcaagcatgttctcccagctcgatcgcgacgatgcaacggttctcaagcgagtcatcctgggtgacctgcgtgtcggcggaactcgcgaaacggcaaaccgttgctggcctggcctgatcgcaaagccttccttcatgctctgctcggcagactacgacgaagaagagatcggcttcccggcgatcagtcagaccaaggaagacggcgcccgttgtcgtctggaatgggatggcgagaccgcaaccctgaccagccgtgcagacaacgaaattacgcatcatgcgacgttcaacgattgggcgtcaaagcacctacagcccggcgatagcctagacggtgagctggtgtgtttccgtgacggtaagcgtttgagtcgtaaggactccaacggctttgtgaacaaggccatcaagggcaccatcagtcctgaggaagcagaaatgctgaccctggttgcatgggaccttgaagacaagactctgccctacaacgagcgtttcgccaaggtccagtctttcgaaggcaaggtgcaggcgatcgagtctcgtatcgtccattcgtatgaagaagctctggctcacttcaaggaagctcgtcgcgctggtctggaaggcaccatcctgaagaagtatgatgctctgtgggaaggcaagcgtgtcaagttccaggcaaagttcaaggctgagatcgaagcagaattccgtgtcgttggctttgactatggcaagaaggggaccaagaacgagaagcgagttggcgcactcaaggtccagtccgaatgcgggcaggttgcatgtgacgttggcatcttcaaggacttccctgacacgatccgcgatgacatgctgacggatctgccgaccatcatcactgtgcgatacaacgagcgcatcacgtctcgtggtcgcgatacgcagtctctgttcctgccgcgcatgatttcgattcgcctggacaagaacactgctgacaccctggatgacctgatcaagatcgaagcggcaactctggaatgattgagtcttccgtacagacaagagaaggcgatactatcggtttcgcctatgagattcgtcacggtgaggatttcgatcctcgctgtggcgtgtgtacccagtacacggaatacgtgaacaagattctcggcgagtggctgcctgaggcattcatcgttgaggcagattggttgaacacgaatagttcttccggtctcaacatgcgcaagatgttgatcatcaagagtggtcctgagccggtgctggaacgacttctgttctggctcacttccaactttgatgagactatcaaactcgcatcaattgattcgattgtgttccgtgaactaagcacacagaatgagtactcctataccattcagtattgacgctgtaacccatcaaccaatggagtcgtaatgagcattacctttgagcagtttgaaaagcagattgaacccatccacagcgcttattgtgccaagtacaatgagcttgctgttctgcgacgcgagttccagaagctggcaaatcagatcagcctcgacaatgtcgaagatgaagatgagcgcgatgacctgcatgaagaagtaagcgaccgtcttgccgacctgacctacgatttcgatctgcaatgggatggtttcgagcagggtaacatcaacttctgggttccgagtacttgctaatgaccactgaaaccaaaacctcttttgaagcgttccatgaacaagccacggacctctatagccgcctggccttgatcgatcagctgttcaaggaagctgatgctcttgtcaggaacgtcgatcgttcttcattcactgacgagcagctcgatgaagcctatgaattggctcatgaaattggatacgctgccggctggcagtttgacagtttcggtgaaaatggcggctactggcagccttcgacctgctaatcattcaaccaaaggaaatgacaatgagcaatcttgatcttgtgaacgccgccattgaagccggcaagcccctgtacgacgaatactacaagctgcgcaacgttgcagaccagaagctgcaggaaatcctgggtctggtagagtctctcaagctggaccctgaggacaaggatgatgaagaagagatcatcgagatcatcactgacctgggtagccgctttggtcatgcgtgggaaggtcattgggacgtcggcggtcaatgggacgttggtgacgaaatccagtactgggaaccgagcacctgctaatgagcaagaatgaagaattgatgaaggaactttatgagcggacaaaaccgctcaggaaagagtttgacacactcaagttcgctctggataagaagcgttatgagatcgcaggtctcatcaacactctcgaattcgaggagatctctgaggatgatgaagaagcttacgagtctctgattgacaacatcgacagcttcatgagctccttggacctgacttggactggcggacgctatttcgagtggggcgacaaggattggaacccaggtgaagaaattcactactgggaaccgagtaactgctgatgcacgtaatcaaggcacctgttcgtattcgcggtctaccgcagcgaccaactgtctttctggctgggtccattgatatgggctcagctgttgaatggcagactcgccttgaacgcgaactagaatacttcccaggcacgatctacaatcctcgtcgtgatgactgggacagttcgtggcagcagacagatagtgatcctcagttccgaagccaggttgattgggagcttgatttcatcgagcactccaaccatgttttcatgttcatctctaaggacagcaaggctccgatttctcttttggagtttggctacatcgttggtggtgaacagaacccggacaagctattcatctgtgtcgaggaaggcttctatcgccgcggcaacattgaagttgtctgtcgcagacaaggcatcaagctatacagtaacctcgacgaagcaatcgaggcattcaaaatcaaactggcaagtgatctatgactgaattgttctatccctcgaacctctctaagcctatgcctgtattccttggcggtagcactgcaaagggcgactggcagaagaaggttgtggctgcattcgaagacacgcatattcccttcatcaacaccagtcgccctgattgggacgtcgttgaaccgaaccgtgaacaaaagaacgaacacattgcgtgggaattcaattggcagaagcgagtgctcaatcacttcatctgcattccggcggatgcgaagtctcctacagtgatgctggaactgggacttgcgatttcgtgtcatggtaacgctgtggtgttcattgatccggagtattcgcatttccacaatgctcgtatcgcgtgtgagacctatggtgttcgtgtgttcaccgacttcgatgaagcggtagaaaagttaaaggacttgttcctaacttctcgcctattctgagaaaaacggcataaatactcatatgaaaacaattctcctcacatcgaaaaattggcatcaggttgcagctctagctgtcaagcccgccgacgaacgatatgtggctggatttgatttgaatactgggtacggaatgagttgaaagattgattttcaacttggctttctggacccaggaactgaaaagtttctgggtttttacttagtggtgcgaaaaggttgataagaaaggctgtccatgtagcatatggtttcaggacttttaaacattgacgcgccgaggagcttatgtgaaaaacttgtacttgacggtaacaaactttctgttaggctttggcacgttgcagccgttttgggcgacgagttacctactgatgaagttaggaaccgtttcaggaaacatgtaagaaaaggttgtgtagaaaacagtttgatgtaaactacgcaacatgaagtaacaggcgcgcagcaaagaagctgacgcgacgttctttaaaaacaaagattcaagttatacgtcgttagttcaattggcagaacaccagcctccaaagctgggtgttgagggttcgagtccttcacggcgtgccaagttttatgtctgggtagcaaaacggcaaatgcgctggcctgcaaagccatgaggtgcgagttcgattctcgcctcagactccaagttttatatctgtgtgtagctcagtctggttagagtactcgctttggaagcgagtggtcgttggttcgaatccaaccacgcagaccaagttttatcccgttgtatccccagacgctacgaacgtctacaaaggtaactggagtggcgccaaaaagcgctgatgcaggttcgaatcctgtcgacgggtccaaacagttctcggacttaaaccgagtggtggaggataaactgagaaatcagtgaatcccttgacgagatggagtcattaactcgatcgagaattttgggctgctcgtataatgagtattacacctgccttgcacgtagggaatcggagtttgattctccggcggtccaccaaaacttggggccttagctcagatgggagagcaggtgctttgcaagcatcaggtcatcggttcgatcccgataggctccaccaagtttagatatgccctgttggtggaattggtagacacgcatccttgaggtggatgtgctgaaaggcgtgagggttcgagccccttgcagggtaccaaacaagactgttcaatcagtcgaacgagttggaaggtcgggttcgaatcccgaagtgatgacgtccggattaggtcatcatttggtgtagtgggcagcacgccgatacattaaaaggttgcgcagaagtgtgcttcatttagactgtgaacacagtcaggcaagtcgatcaaaagacgcgccgacaagcccgaagcgagttcttcggctaagaaggaaagacatcgtttcctacttgtaacgacaagtccttagaggatgaagtctccgttagtcggacgcctgagagtggcgaaaaggattcttcggtatttcgggttgcaagcattaaggtgatgcaggaggcttttaaccttcagaacagggatcgttaccctggcgacccaccaagttttaagccccgttggctcaattggcagagcagctgttttgtaatcagcaggttgggagttcgagtctctcacggggcaccaaacaaaccgagaagtggtagttaacaactatcggcggcatcgggagaggatgacaagagcgacagtcctcaacgaattttgcgggtgtggtatagtggttgtgccctagccttccaagctagagagacgagttcgatcctcgttacccgctccaagttttacgatgcatctgtctgctaattggaataggcaacgatcctttcaagttcgggaatgcgggttcgagtcccgtcagatgctccaagttttgctccactcgtctagtggctaggatgacaccctttcaaggtgtagaagagggatcgaaaccctcgtggagtgccaaattatgcgcctatagcacaactggatagtgcatccgaattctagtcggatggttgtgggttcgaatcctactgggcgcgccaagtttcaaatggataggtgggcgagtggtttatgccagcagactgtaaatctgccgcttaattgcatcgttggttcgaatccaaccctatccaccaagtttatgtgtctgctgtcgggttggaggacggcaccgggctgtaaccccggatcctcaaaagggacgtagtaggttcgaatcctaccaggcacaccaagttatgtggttccttagctcagttggtagagcaacgcttttacaaggcgaaggtcgtgggttcaagtccctcaggaactaccaaacgttgaaacaggttgtgtagaaaacagcttggtatacaataagcaacatgaagcaacgtccagaccactgaagagtcgccgggacgataaacaaaggcacgaaacgtcgagaggcacaaaacattagcctcgtgagacgtctggtctagcaactcaattgtcgaaaggcgattgtttaggaatacggtacagtgatgtgcctaatggattaaacgcccacaagcggtccgccagagatggttcctctagaacaagtcgacatagtgcagccgaaaggttggcgtctagtatccctaggcgatatgtggaggctcagtgagacacgagattcaggtccaatgccgaatggtgaggatttgatcgtttagcgacggtagtgtttcggcttagcggcaactgactccaaggacattgaatcggcaggtacgtagttcaagccttagcgggtaagggcgagtatcaggtcaggcggactaatgttcgtactgtatcactcggacgtaggcttagcggctgaaacgagaggaggtcgggtaagaagctgtcgcccaaaaggctatggacttacgaacctgctcgaccttagtgggctttcaactttgacggttaatcaaaactacgaaaaacgcaaagtcaggttcggtcgtaagtgaaagtggcttaatcgttgacacgaaagtgaatcaacgcaatttgaggctcgcaaggctgatgattgtctatcaggaagtgcacctaagaggaagcccctctgaatggctcgcaaggtcaagggaaacgggaaggtagagtagcttacgatgacagaggaaacgccacctctttaaactaggcagccatgacggttaacaatgatgcatcgaaagatggttgttgtggaaaagttgggaagggctccgcaagagctgataatccaaacgaatgaatcgtctcgtcagactgtattctcaggtcgacactttgtttcaaggagttgtattcctcaaacgcttcaattgaagtttttgcgaaatgcaatttttggtcccatagtttacgattggttagaactcccgcctctcaagcggaagaatcgggttcgactcccgatgggactgccaagttttatacgcgtgtagctcagtggcgacgataagttcaaagacggtaggcataccgtcacgcagagcgagtcgaggattggcgatacgactgtgacgatacgaaggtggagctcgagatcctagctccgacaataacggtacggtcaacattcgagagcgccgggtagataacccggaggtcagtggttcgattccattttcgcgtaccatataagtagagtagtacaaaagttttatccgggtttagctcagtctggcagagcacgccgtttggggcggtgaggtcgtaggttcgaaccctgcaacccggaccaattagagaagtgttatggaaactttagaaacgaaagtgacacgtctaggcaatgggctttatggatgcaggatcatcaggtcagctgacaagaagccaattgttgaattaagagttgaaaagtctcagattaggaacgctatgtttgacatgctccgaactctagacaagctgggatatgatagtcctatggcacatgcttcgcgacatcgcggtaaggcttgtgtcacagactcgaaatatatctggcattgatttattctggacgcgcctaatggggaggcaccgggctgttaacccggcgatagaaatatccgacacggttcgattccgtggtccagagccaaatatggattacaggccaactggtgtaggcatgcagctgttaactgcagattgttgagttcgattctcaagtagtcctccaaaacaaacggtctattagtctatgggttaagatactggcctgtcacgccggtgtaacgagttcgagcctcgtatagaccgccatagttaaaacgagcatgggtctgctgggtgaagattttgcgttgtcagcgcaaagatgatgggttcgaaccccatatgctcgaccaaattaagaatgatgcgcggtcgtataacggcagtatactgggctcataacccggagatggaggttcgattcctccctgcgctaccaatcaacgggtccgaagctcaaatggcagagcaactggttcttacccagtaggaagtcggttcgatcccgaccggacccaccaaacaatggactcgttcccgtagttggtcgaacggagcggactcttaatccgacggcgaaagcccatcgcaggttcgaatcctgccgggtccaccaaaatgagatagatatgccgaagtacaatttcaagtgtagcgaatgtgagcaccgcggtgatgtctggaccggcgatactgaaaaggtcgacgtggactacaaagacgtagagtgccctggttgtggaaaaaagacctacaactatgctccttgggattcaggtgcttcatctcagtcatggggtcatgtgaagcctacaacactaggcagacagaaggctcctcaggattttagaaacttcctgacacagattaagaaggcacatccaggttcaacaatccgagatcattaatcgaaaaggtgttgtgatgtacgtgtatcaaacatattatgtgtacaccgagagattttgtcacccagacccacttgagtgggaagaaattcgtaaagtgatttgtactacgttggatgagagcttggcgcaagaagttgctgacgctcacaacaaggaacacaacaagatttcaggttacaaagactacgccaccgttgcatgttatgcgttggcaagtcgataaagaatcgccgttcagtagctcagttggtagagcgcccgccacgtagcgcgggaggtcgtgggttcgagacccacttgggcattaaggcgctagggcgaatttaaagtactcacatactagttcgagacagtatcgcccggatcctataattgtcagcaggtaatggtcatgcagaagaaaattgacgtgaaagcagtcgaggcgttcatgcagacgcagagccctgagacaaaagtttatcttggagcagactccgagaaggtaaaaatcaatggtaagatgtacgcggattacaccgttgtcatcgttgttcacattgatggttgcaagggttgtaaggtattcgccgagacaactcgtgaggaagactacgataaggatccttcaaagccgttcactcggatgatgaaggaagctgaaaaggtagccgagcttcacgatcgtttcaaagacaccttctacgacttcgaggttagtattcacctcgacatcaacccgaagaagacggcaggttcaagtatcgcaatggaagcggcacgtggttacgtcaaggcgatgaccatggttgatcctcacttgaagcctgtagcatttgctggttcttatgctgcggatcgcgctaaagaacttggtatgtgctaagagatatgcccctgtaggcgaattggtatagctactggccttagaagccagcgccgaaaggcattgacggttcgattccgtccaggggtaccaaatatgtcggagtagctcagttggtagagcggtagcttgaaaagttacgcgtcgcaggttcgattcctgtctccgataccaaaacaccgtcactcaggtccctcggtgcaaaataagggaatactcaggagaggagattgtagtatgaagttgccttcgcgttttcaaatcggtgataaggttctcgctggtcgtcttgatggcgggagcaaaggtgaagtaattggtgtacacttcaaccgatacaaagtatcgtatgatgtggtcgacgagttgacccaacgtacaaagaagcacctcagtgaacgggttcatcctgtcacagagtaaatacagatataagacaatttgcatcgttagctgagatggattagcgcttgcctgaagagctcgagaggttggttcgataccaacacgatgcaccaaacaaaggaacgtgaatgagctttaagccggttaatactttcgtcatcgtaaagcgtagggaagaagatacaacgagtcagggaggcatcatcatctctgggtcagttgatcataacctcttcactgttgtggccaagaatgatcttgtgacattcgttgagcccggtgatacggtagtaatcaacattcgcgaagcggctgaaatcgacgatgtacattacgcagttgatgcaaagcacatcttcaccaaggttgctaagtaagatagttttgcccaggtgacggaattggtatacgtactgtcctcagaaggcaggttttgagggttcgagtccctctctgggtaccaaagtttcagtgttccacgtgtcggaattggtagacgagccagactgtgaatctggagtttgcgggttcgagccccgtcgtggtccccaaagttgatcaggtgattcgccaccttagagtgcgaaattgaaatattgcctgttagctcagtggtagagcaatcgcccgataagcgataggtcgtcagttcgatcctgacacgggcaaccaataagccttcatagctcaaaggtagagcactcgcccgataagcgatagacctaggatcgttacctagtgaaggcaccaaaccgttgacgaaacagcgtaagggcgctaaagtagtacgcaacaaggtattctagttggagccttgcaaagagccggactgttaaaggttgcggcgagactagattggtagcttaattagcttacggtgcatcatatgttgctagggtatgatgactcagaagccttcgggaacccttaacttagctacaaattctatagcccagtcgtttagttggtccaagacgccgtcctttgaagtcggtcatcgtaggttcgaatcctacctgggttgccaagtttgatgcctcttagttcaatggtagaatgtcgctctctgaaagcgaagacaacggatcgataccgttagaggctgccaaatatgggactgtgccggatagctcccggacattatgatgttagtatgcagaatcaaagcactgtggacaggtaccgggacctttgtgatgattcttcagaacgttgattgatgcaggtcccgccagatgcaaaagtaagactagccgttcaagtcggtaagcacatggtgtgcaccatgccgcgttaggtgtggaggaggcgttcgaatcgtcggtggttgccaggcccctatagacactgcttgcaagagggatttaaagtaaccaaatgaggtcgctcctcgcggaacagttccctcggtactattctatgaaggttgtagctcaaaggtagagcgccgggtgtcggacccgggtcaaagagtatgaagttcgcgcgaactgtctgctcaggtgcaggagtcgaagcctgtcagccttcccactaattgataatgagagacgatgagacagttcaaccttcgtggtaagaagacatatcgtcctggctgtggttgttgcgttgttgaaaacttcaagccagaaatcattgacaagattcacgcatacgaaatgcgtaatccagatgaattcgctctcacagcagacgatttcgattgtgtagaagattttctcatttatattgatgttcccgttgaccaagtttgttatgatagttcacactgcgctcccttcaaaggcaaggaagaaagccaagaagaaggttgtaccgacaaggacgccagttaagaagttcgttgaaaagaaacgacagttcattcccaagatacccgtttaccgtgcagcaggaaccgagcacatccgatcacatggattggagaaggtgccgcctaaactggaacgtccaatcgtgtatcatggcgatatggctgaacgtgaagcggctgctcaagatcaaattgagtaccgtgagcatttggttagaaacgctttccgtaacgggaaggtatcggcatgctacatttcaggatgacctatgaatactgtgattgaaaagactgacaagggtgtgatcaaaggcgcagtgttcatcatcgccggcgataggcattgggttgagggtaatgtctacggcaaccccaacttcaaggatggcacctatatccacacgtccaagattgttgcagttcgtggacgccgcattgaaaccctgaactcgttctacacttgcgagttccacgttgatggacctgttcgcctatggtaacccaagttcgtattctgattgatgagtgtggtgcacctctggattccattgttgaagtgactgaaatcttggatgatggtcacatcatgtatacctgggaagacatcaccttcatggcttcaccggaagcctgggcattgcattatccggattctgcatatggatatgattctcagagcgctggcacagacatcaactacgagattttgagaaacgccgctgagcaattcttgacgtacgtcgaggaagaaatgatcgacgatgccgccattgattacttctacgacgtgttcaaggaaactctcggtaagtagaaatattggagcgtaactcagccaggtggctgacgctgtttgctaaacagttgggaccctatgaacgggtctggggatcgagacctctgcgctccgccaatttggatttgatcatgaaaatcgtgctgcttgatcttgagcaaactgtgatcgacgactgggagcacatgaacctgcttccaggaaacatcgataagattcgctgggcaattcagcacactggctgtaagctgggattgatgtcctgggctgtatggaatgaggtggacaaagagacgttcaagaagcgcctgcaaggtccactcgaagaagtgcttggtatgaagttctccgaagagcttatcttctctatgcacgacttctcagacatcatccttaagcgacgtcggaaatggcttagccgtgacgatatgtttgacctgtttggcaaggaagagtgtctactccagctgctgaggcttgaacacttcggaaagaatgctcacgttactctgatcgatgacgtggtcgatcacaacatggaattcaccaaaggcgctgctaaggtgcgtttcatcaatgtagatgatccaatgttcaagcattggaatatcaatgaaactgtccatgactatggcagttggagagaatgatggaagaacttgctcctcagaaaggcaatatgcctgacagcttcatcctcgttcgtacatctgcaggcgttcatgtgcttggtggttggagcggtggctatctctacggcgatagctggcgtctcagcactgcattgaagcgcgtggtagagttcgatggtgattgggtagttgttgaaacaagatcaggttcgacctatgtcctaccgacacaagcagccattcgccgttatactttgactgtgacgacttcgggcgtgttcaactcgttcgaccgtcaggcaaaggaacaaggaatcctctttgaagcgattccggaatccgaattcaacgatgtaatcaaccaactggaaaattgatcatgagcaatgctaagctgcaacgtctggaagaagagctgtatgaaaagctgcgtgagattcaggatgtcgctgtagagacgaacaccccgttctctttctccatcaactaccatacctatgatgtgttcctcccggatcatgaagatgaagacatggtagaatatctgaaggaagaagttggtgttgaagttggtgattgggtcagctctagcgatcgttgctaatgagcattgacactgacctctatgagttggtggaaggtagaccagacgcagcttccatgctcgtctgggctgcatcactgctcgggctaaacgccgttcctgattccgaagaagttgaagctgcaattggtatctttgaggatgctcgagagcatatcatcgagaaacgtgctaaggatcgtttgaccgatatcgttcgctacattgtcccttctcagtacgataaaaaatgggacaagcgcacgtcgaagcatcctgacattcctcgtaattggtggaatggtgctttcgtcaaatcgttcggatggaccaaagatagcttcattgtcgaagttagttcctacgtcggcaacaacgagtatgatggggcaacgattgagattcctcaacatctcgctgacgtaaagaacttcaattggaacctgcaagataagattcctcttattgacgcattcctaaaagcagccaaccgctaaatatcacgtaaggattgttaaccaaccggggagttggcaccgcttcgaaagcggtaggtgcccgaaagggcatggggatcgagacctcagcaatccgccaaacaatggacagtaaactagccggggagctagcgccgacttgaaatcggtaggcacgtaatggtgtggggatcgagacctctgctgtccgccaaacaaggaaagattatgagtcgtagtggaccgattgaagctgtagagtacagaggtgtcaagcctggtgatcgctgcattgtgatgaccacgtctactggacgttcgaagatgcacgcaggaacctaccttggtcaacgcaagggaaattgtgtcgtcgagcttgattatatcaagaccatctttgtgaatgctgaaggcaagcattacgattggaatgctgagtataagcaaaatccatatcccagagctcgttggaatactcccgagtatcatgcggaacaggaacgctacaacttgaagcagaaagagcttcgagctggttacgagtacaagaaggtcccgtctactcgtcgctcgactctgcagaacaacaatgtctatcctgcggatatggcactgaaagatttcaagctgtaaatagaacatatggacagtaatctggcttggtagtcagcaccgcttggaaagcggttggtaccgaaaggtatgggattcgatttctctgctgtccgccaaataaggcgaacgatgatttacgttgtatttgatgatacgtatcgcggtgcacacaaaccatttcattcaattgaggcaactcaagaggatgcagatagggtggtgcatgatttgagagaaacaagcacatcaacatgtgcaagaacactgatcaaatggaaggcatttgagtttggtcagacgtttgaactacctaagcccttatagcacagtggcagtgcacctcattggtaatgaggaggtcgtcggttcgatcccgactaagggcaccaaataaaggaaatggatatgactgatacgacaagcttcaccgctgttggcgaaggttaaaaatctgcgggtataattcagtctggtagaatgcttgcttgccatgcaagtcgtcgcgagttcgaatctcgctgcccgctccaagatgtcaaaagccagggctttaatcggtcctggctttttctttggttgaatagaaacagtctacctataggataaagcaatgaacagacacgacgtgaaagaccagctcgaagacctgtggttcgatgtgcgccattggttcaagaatctccgcctggaaatcgacacccgaatcaacccacgccagaagtggttgacgaaagaaatcggtcgccgtttcgtcgacaaagactacatcatcgagacgaccatcttcgaaagcatgatccacttctgggaagaggacgatggagaaaggtcgacccgctaccagttcgagcactacgaaggaccgtgtggtggcaaggcgctcaagcccgaagaccaagaagcctacgtatacctacgtaagctgtacgctgacctggacaagtgctaccgttgggctaagacgcgtaagggcttctgggcagactgctacaccaactacaagccggaaaacgagaaaaaactcgaagccgaagacacgtactatatgaacgaaatcatccgtctccgtaagcacatgtggacctaaatgtacggaatccctgaaaactaccggcgggtggcagaatctttctatcgcccgcatggttgcaccttagatttttctcaaaaggcattgctgcaagctttcgagaaagaaacctacggcgttgaccacgacatgtcgaagaacggctgggcttttggcaagaaagccttcgacatcactgtcgcaagttggcgcgaagatcttgcagaaggtcttttctgcaagtatgactacctccgagactatgaagaagattcgttcgagtatgatttcatctggaacgtgatcaagaatttttcttcggcaaggctgttcacttactgatcttgttctatccaggcatcctgcatatcataattgtgtagcacttatacacctttgaggaaatgataatgagcaacgaagtttgcgtgaagttcccggcgcacctggtgcagaccgtccacgacggctacctgtacgatcgtaattcgcgccagctgttctcgttcaagtctggcaagttgaagccgatcaagcaggtcggttgctaccaggcaaagaagtcgtacggtgaagatggttgggctgtctccgtcagtggtaagaagaagttcatggccaagaaggagctccagtctctgtatccgacggagtatcaggttccgtttgcatgagcttcgttatcctctactgggcaggtgtcatcgtcaccggtggtgcctgcattttcggactctaccagatttggaagacgaagacctacacgccaatcggtttcgagcatgatgcaccagcgacgctgggttctttccttctccggatcttcctggcaatgctcgccacctttgtaccaatcatcaatgcctcactcgccatcatgattgtattcttggcagcctacatcgcgatcgcggaaaagtttggtgacaggattctcaaagtccttcggagacctctgtgatagcagctttcatcatcttcatgcttttctatggcggtcctgccttgattgttggaattcccggattcctcaatgttcgggcgatgatcaaggacaaggtgttccgagactggatcgaccattacgaaaaacggacaactcgtggtgatgttctgggcagagcttcccttcttgttcttttgactttcctgccagttttcaacattggctttgcacttttcgttgtaatagggtggcttcacgctgcctggtacaaattcttcggtgaatggtcaaggacacctgtataatggaagcgattatctttctgattgtctacctcatttcgattccgtttcctgcctatatggcttggaaagaagttgatgaggtccgcacatcaaagcgaatcaaaggcatccataacttcttctatcgcgatgccacgcggtgggatttgatctggacaggcatatggtgtggctttgttgcgatgctgccactggtcaacactgcgctcaccattggtggagctttggtttggttctttgagaagctttgggcaaccaaattcattgcatggatgaaaactccgctatgagcatgaacacaattccaacggaactgatcgcggttccgaattacgatggctacttctggcatccgggcgaagagcagttgtactccctcaaggtgaccggaacgcttaagccgatgaagtatcatggtgcgagatatgtgccaaagctgtatcggcaaattcctgcatcgtattccgtatcgcgtgctggcaagaaatcaattctgaccaaggaaacgctgcggaaaatcacacaacagaaatacgaggtgccttatgaaagtcggagtcgcatctgatctccatctagattttgcggatatgaaccccgagttcttccagtggcgtggcgacctgctgcttctcgctggtgacctcggtgaggaagattatctgcggaagcatggtgctgagttcttcgatggcgtctccaagatggcggagcaggtcttcgtcatctcaggcaaccacgagttttacggctctgagctggatgtagcggaagaccacctggacgtctatctggagcagtggaagaacatcatcccgctccgaaatgaggtgaagtcgtttggtcaccttgacgtctttggtggcactctgtggactgattatcacggtagtcctatcgcggaaatggctgccttcatgggtttgaatgacttcaagcaaattcgcatcaagaaggcaggttaccgaaagatcactccgcgcgatatcctgatcgagcatatgaagggaaagaacaagctgctggacttccttgagaagcctagtggtggaatcaagttggtgatgacccatcatgcgccttcgatgcagtctgtgccgaaccgttttcgtgctgattacgatttgaacaaagcgtattgcaatcactttgatgcgctgatcgagtctttccctgatctcagttattgggttcacggtcatacgcacgattacatcaactatactatcggtcagacggaagtgatctgcaatccgcgcggctacccagctgagcgaccagcacatcttccgccatatcaaccaagggatattttgctatgaacatttttatggggtcctggtctgaccgtgaggatatgatcgcggatttctgccactatgatggcgaaggtcgcgagcgcgtcgaaaactatcttgatgacgctcagatcatccttgcatgttacgagagctctgggtacgaaggctccgctttcgtcctgttccgaaagtggggaaagtattacgaagtgaacggtagccactgttcctgctatggcctcgaaggacagttcgaacctgaggaaaccaccatcgaagccatcgcgcatcgtctggagcatgggaacttggggcgtgagtattcttacaccacgagtagctatactcagaatgttttcgcggatgaactggaagaagcaatcatgaggctggagaagatctaatgagcatcgttgaacaactcgctcacctctgcgtgtgggcaggcacggataactaccgttggaagatgaagcaggtcggctggaccggttggtccgtcgacggtctcaaggaaaagcctgccgccgaggaaggctacgagaaggagtaattatgggcggaaacgcttttgataaggcagaacgcctgacaccgcagttctacaaagatgtcgtagacgatatcaagtggctcctgcggaacatcatggggtatggctccggcttctctattccgcattctgtgcggaacaaggaaagctacggcgacgtcgatgttctggtggcaagctcgcagatgcaagctgcactcaaacagatgaagaacggcttcaatgtcgttggtgaaatctcaaatggttgcggctacaatctcctcgttcacactgatggacagtacgttcagatcgatttgaacaaaaccaaggatgaggacatggaatttgcgttccattacttctcttggaatgacctgggtaacctgattggacgtatcgcacatcgtcaaggtctgaaacatggtcacgacggtctgtggtatgtgcatcgtgatggtgaccatcagctgggtgagatcctgctgaccaaggactacgacactgcgctgtgtcatcttggctttgacgtcaacgatttccgtgcaggctttgattccttcgaacagatgtttgattgggtcgagcgttgcaagtatttcgagccgagcgcattccctcttgagcatcgtaaccatcaggctcgcgttcgtgatgcaaagaggaaggtgtacaacctgttccttgagcgactcgccttcgatggagactacgttccttcggacaaggaaaagcacctcgagcgccataaagacaaatggcctcacctgagaagcgagatcctcttcctgaattgtcagaatgctgttcgcaaggaagtcaaggctaagctcaacggtaacatcgttcgagagttgactggacttgatggaaaggagctaggtgagctgatgcagattgtgaagcggatgctacctgaggacaaggtatacagcatgttcccagctgagattgaggaagggatcatggaggcttttgaacgttacaaggtagagaagaatgcgactaattcttgattggactaatggcgagtatgatgacactcgcacctgggttgaaccggtagagtttgaatccaaggaagtcttctttgaaaagctcgaggctaagaagatcgagtacaaggaaaatcgtgacaagcagatctctgtccgtgagaaatatgtgcggaaagaaatcagctatgacgaatacttcgagcaactggacaagcttgactctgtgaatatcgtcgatgacaaggggcgcgagttcttccttggcgatatgatttacatgggtcactgggatccaatcactgtctacaccgttgatgaatggtacggagattgatatgaaagagaagtcgaaagataagctgaaatactacgctgtgtctgcaaagacggaatcgggtgatgactatctgttcctgctcaaggcaaagaatgctctggatgtagccaaccagttctcggtagctatggatgaagagctcggctacgtctactacaacgctgttgaagccgaagatcctgaggacgctaaggctgccaagaaggccatcaatcgtgcaatcgaaaatgcagagattgactgaggcactcaaagaatttgcctatgatatgctctatggtgttggatgcatcatagagcttctcatcgactgtgcaattggtatctgggaagactgcgtacgcaaagggtaaatactgtggatacatcacacaggacattttccaatgccactaagtttcttccccgatgccgttcctaccgcgatcggctgggcacatccactgaccggcgaacagctgacggcaggtgctattccagcatctcagcttgatggcgataccccggttgatttctacaagccaaatgccaaggccaagtctttccttgacccagctggttcaacacgtaacctgatcaaccatgttgctcacggaaagcgagttgagtttgcagttcactccctcgacaagattgcctcagtggcatggacgttcgggggtgcagctgttgctagcgtgaatgttaccgcaggtggttctggctataccagcgcgcctaccgtaacctttgcagcaccgcctgcaggaggtgtgcgtgctaccggtactgcggttctaactggagcagccgtcactggtgttacgatcacgaacccaggttctggctacactgctgcaccagcaattacgtttgcgggtggtgaaggtacaggtgctgcggctactgctgttcttgctgccaacgcagctgttacaggtggagctgtccagcagaaggtcttccctgcaggtactcacagtgtcaaggctgttgtttcgtatgtcggtggcaccccagccaacgtcacgttgaacacttcggtcaccgtagcctaatagaaagaacccgtagcggcgaaagcttctacgggtttttctttggtgttgtttcgtcattgatgttatatcatatagtcatgaacacattctttatttctgatacgcacttcacccacggaaatctgatgaagcattaccctaatgggcgtaatcgtttcgcagacgtggatgaactcgatgaacacatgatcaccgagtggaatgctcgcattggtcgaaaggaccgcgtgtatcacgttggtgacttcggcggatgggacattgaaaagtccaccaaggttcttcgtcgcctcaatggccagaagttcttggttccgggcaaccacgacaagaagcacatcaaggacgagaagttccgttctcagtggtcgatgatctatccctattcgtatgctgagatcagttgcgaaggtcagccgattgtgctgtgtcacttcccaatctgggaatggatgcagattcatcgaggctggtggcatattcatggacacgtccacggcaagccgactggtattcctggcaagattctcgacgttggagtcgatggccacaacctgttaccatggtcgtgggaagaagtagttgaacacatggcaaaccgcccaacaaggacacatcatgagcactgaaatcgaactgctgtttgaaaagcttgaccagatgggcatgcgcctgggtggtctcactctgggtgacaatcctgaaaatgctgagaaggtagctcgcgaactgcgactgagcctggaacgtcttgaggatgttggtctcgaagaaattaccgacttcgactgcacaggcgaaccgactcaggaaaagattgatcgtgaccggcgtgctcttgctcgtatgcagaagcgagctgacgacatcaaggccaagacccgcgatctcaagcgtgagctgggcgaggacctgatgaaatatgctgaagaaaatcttcgcccctattcctatggcaaggcaggcattgaagatgctgtagacaaaatcgtcaacactgccaacctcaatgattacgattatgaggaaggctatagtggtttctggcttccttccaacttcggctgctaaaggagaattaaatgccttactcgattcctatgtatgaaagtgaacgcggttggggttccaagattgatggctatgctggtccgtttccaacctacgaggaggccaaggatttcaagaaggcctacaatcgtaagtacaataacgaagcccgtgctcctgactactacatcatggcaatggatccggtagaaaccacaccgactatgaagcatgactaccgatcaactgtctgagcatgtcgtactagacaaagcttggttcaatcggttagttgagttcatcggtcctggcgccctcacctacatggcaagaaacatgcctgagggcgtcgttaccgtcccattggatattgatctatcgaaagttagatcatagtctaagcaactgtggacaccgactttctgattcctgtataatgctttggtagcacgattcattaaaagaaacttcaaatagaaagaaaaagtagaaggcatgaaaacaatcgaaaagcagtttagaaaactgtcagaggtggaacacgttctgcttcgtcctggtcggtacatcgggagcattacgtcccacacttctgtggaacattgtccgacttcgggaaagatggagcagcgtgagctgactttcaatcctggattcctcaagctgttcgacgaagttgtctctaactctgtcgatcattcgaagcgaccggaaggcaagaatctcgataccatcaaggttgatatcgatcactccaccggtgagatctctatctacgacaatggtggtattcctgtcatcaagcacaaggaatacaatcagtacgttcctgagatgatcttcgagcttcgttcgggtagcaacttcaatgatgctgacgagtcgatgctcactggtcagaatggtgaaggtgcagcactgacgaacatcttcagcaagaagttcactgttgagacttgtgacggcaagtacaagttcaagatggagttctcggacaactctcagactcgctcgacacctgtggttcgaccaggctcgggtggcttcacaaagatcacctatcagcctgactttgaaaagctgggcatgaagggtattgatgaagggaacattgcagttctcgtcaatcgtgtctatgaaattgcagctacgaattctcacctcaaggtgtatctcaatggtagtcgcatcacgttgaagtccttcaaggattacatcgagatgttcacacctgagtatgcctatgacgaaaacgaacactggaagatcggtattgccagtgctgaggatgggttcgctcatatctcgttcgtcaatggtactcgcacaaagactggtggtagccatatcgactatgtggccaatcagatttgtacggaacttcgtgctcatatcaagaagaagcacaagatcgatgtcaagccttcggagttgaagcagcacttccgactgttcattgatgctcagatcgtcaatcctcgctattcgtctcagacgaaggaagacctgatcactgaggtgaaggacttcaagactagctggaccattgatcagaagttcgtcaacaagatcatcaagtcgacgatcattcagtcggtgcttgattgggcggctgcaaaggctcatcaagaagagatgcgcgagctccgtaagctcaacaaggcaacggacaaggctaacctcaagcatattgcgaagttcaacgatgcgactgaaaagaagaatcgtcatttgacttcgctgttcctggctgagggtgattcggcagccggtcctctgcgcggcgctcgtaatccgaagctgcatggcatctttgctctgcgtggtcgaccaatcaacgtgtcggcagcacctctggcaaaggtcaaggagaacgatcagttcgagaatgcacgaattgtcgttgggttgaagtacggagaagctccggacttgaacaatctaaacttcggacgtatcattgtggcatcggacgctgaccagttcggtcactccattgctggtctggtagtaaacatgtactaccgactgtggccagaccttgtcaagaagggcaagatctatcgtctcgtcactcctgtggtcactgttgactacaagaagcaggatctcgaattcttctcgatggaggagtttgaggcatggcgtcttaagcatcagaacgagaaatacagctacaagttcttgaagggacttggctcttcgtctccgaagcagtggaagaagtacatggacaatctggatcgttatctggtgcagttcacgttcgacgactcggcaaaggaaacgatggacctctgtttcttgaaggaagctggtttcaccgacaaacgtaaggcatggttggatctggaatgagatttttcgaagacgatagcaattttgaaacgaccccggcgaatcagtcgggggtcaccaagctgcgagtgaaggacttcctcgatcgagacttcaaatcattctcggaatacgattgtcagatcaacattccgaacatgattgatggtttcaagatcagtcagcgcaaggcagcctatgtcatcaaccgaacgaacaaactcaacaccgttgagcgatattcggcacaggtggcatcggaaactgcataccatcatggtgcaggcaatctggaaggcgtcatcgttggtatggcgcagaacttcccgacctcgaacaatgtcaattggttcgttccagatggcacgttcggtaacatccttgaccacaaggcttcgtctggacgatacatctcggtcgaaggctcgcccaacttccgaaagtggttcagtaaggacgacgacctgatcctcgaatacgagtttgaggacggtgaacagattgagccgacgttcttcattcctaaggttccgacaattctgttcaatggttcgtcgggcattggtaccggttactcaagcacgattctgaactacaatcctgacgacgtcgtgcgcaatgtgctgcaggtcgtcaacggaaagaagcagaccaagctggttccttggtatcgtggttggactggtgatatctcgaaggctgatggacagacgactttccgtggcaagtttgagcgtgtcaacaccacgaccattctgatcactgagcttccggttggtgttgagcaggagaagtatcagtcgcacctgtcgaagcttattgataagggctggatcaaagactatgacgatgactcgacggaagaggctggttggaagatcactctctacacgactcgcgaatggctcaaggcacaaaccgacgaagacctgatggtcaagttgggtttgatctctcgtgagtctgagaacatcgttgtctgggatcacaagggcaagatcaagaccttcgacaatcctgagcagttggttgagtatttcgttgaggctcgtctggagttctacgagaagcgtcgtcagaagctgatcgaggcgacgtctgagaaaattcgttggctgagtgagcgcatgcgcttcattcttttctatctggacaactcggctaccttcaagaacttgaagaaggatgccttggtagatctgttgcagaaaaacaagtttgccgactacgatcgtctgttgcagatgcctatctggaacttgacgaaagataagatcgaagaactttcgaaggcaacggacaacgaaaagtctaccctggttgccctcgaaaaagatacggcgaaggacatgtacgttcgagagctgaaggaaatcaagtaggaacttgttctttctgcatcgaaacaatatcatagttttacggtaaccaaacaggactttgtgatgatgatcaggttggacggcgcgaaggttgcattgatctccgctgccgtcgctcgtgttgcaggtagtgaagcccacaagttcgtcattgacgagcatttgcgggcgatttcctctgccgttggcgccgaaggcgtctcggtgtatgacctgggcaagcggaacgaaaagactcgcttcattcgtttcgacttcccgcagggtgaacagatcgaaatcgaagtcggtccgcagcctgagttcgtgaaccatgacaatcgccccgaaggcgatgatgacaccccgggcggcacgcctgttgcgatgcggatggcagcatgatcgagatcatctttgggtgggcgcttcctgcgctcatccttctcatcgtaggtgggtacttcacctggaagaaagcgaaggaagacattctgtactacgactgtcttactcgcgggacgctgctgagaatcccgttggttcttatcgccgctgcgtttccgggcatcaactgggtggctatcctcttcatcgtagcctgggcactcgctgtgtatgaacgccaaatctctgacttcttcagagagcctgtctgcggaaggaagaaatgagcatctttctgttcgcactctgggcattcggaagtctcttctgtctcgcctacctgaccagcgtagctaaagaccacatcaagcactacgatttgacggttggcgacctgggcttcttcggagtgatgtgcttgttggcggtcatcccggtgtttaacttgctggcaggattcgttatctttgccgagtgggttgaggtcaccttcggacccaaggcaaagcgcatcgtcgatttcatctccaaccacccgatatgggacaaggtaatctttgtctcgaaagaatccaacaagaggtaataccgaaatggctgtgaaagaaaagaaggacaccaagacctacgttggtgcacgcatctccaccaagcagttcaagcgctacctggccactgctccgacgccggaagcgaagcgcgccatcaagtctctgtacctgagcgagccggtcaagttctacagcaaggctgacctggctgctgagaacgaaggtgtcgaaaccgacctgccggtcaaggcgaagtaagaaatggccatctccaagaagcgcatcgctttctggactgtggcactggccttcggggtagcaatttcgctacccccgggcgccaacgcagaacagccgacccagccgaagccggttccgtcgtatgtccaggccaacgtgaatcagttcaagttcacgcagattcctgatccgtcgaccaagggcgagacttcggtcatccgtttcgtcgactacgaactgcgcaaggtatgctacatccagaagatgtatgtctaccatggtggcggtccggcaatgagctgcctgccgctatgaagaagattcttctcgcagttgcgctgatgatgcctctgtctgcaatggcacagaacatcatcatggatacgaacactcagatgctgacccagtcgatgatggcgtctgcaaatgagccgagccgaccgaagccgacggcgcacaccttctacaaagagcgcgtgccaggcaagcccgaagaaggtttcatcccggtcacaagaaatgcacctgctgtaaactatgtgcaggataaggtaagggtcgaaggcaagacgatctacatgctggatgataggactaagggcatcaagtgctacttcatcacctatttcagcgtgcgtgaacctgcaatctcctgtgtgaagtactaactcaactctggaaaatatatcatgaaccgtgaacgtctgatctacatcgctgagtggctggaagctggcgctccgcataagggcaaagtgaagggcttcgacatttccgtcggtgtgcaggcgctcaagagcgatgcgccttcctgtggtaccacctgctgcattgccggtgcggctacgcagttcttcaacgacgaagatggcgagctggccaacgccgcttttggcttcagcgagtggcaggaagatgatgccaccaatgaagccgagtgggatgcggtcttctatgaagcgcaggacctgctggagctggatcataagaccgcagtcgaccttttcattccggtcggtgcaaccggtatctacgctgaaggcaccaactggtcggatttcaacgacccctacaagaccgcacgcgtcatccgcaatctgctggagaccggtaaggtcgactggagcatcgaataatgaaggcaactctgaccatcggtgtgtctgcctcgggcaagaccacctgggcgctgtctcagccgggtgaagtgctgagccgcgacaactaccgttggtccatcatggaagagaagggcatctcgccttcctggaccaactggaagtggaagtgggaaaatctggtcactgaacgcgttgatgccgacctggcactgtgcgcggctcagggtaaggatatcatcatcgccgatacgaacttgaacgagaacgttcgtggcgcgatggctgccaagctggaagctctgggttacaccgtcgaatacaagttcttcgatgtgacttgggatgaagctgttcgtcgcgacaacgagcgtgcgcatggtgtcggctattctgttctgcagaagcagcatcagcagttcctggacaaccatgttggtcgtctcgccgcagacgctgacaaggggactcgtaaggctgccatcgtcgacattgatggaaccgtggctctgatggaaggcgttcgtggaccgttcgagtggcacaaggtgcacctggacaagccgcatactccgatcatcgatatggtcaagggtctgatggcagctgggtacttcatcctgttcacctctggtcgcagtgatgagtgcttcgacctgaccgagaactggctgcagagcgtcttcgcccctgatggctactggcacggcgactgtcgtttgctgatgcgcgaagcttcggatcagcgtaaggacacgatcgtgaaggaagagatctacatgcgccatatccactacaactacgacgtgcagatcgttctggatgaccgtccgagcgtgtgccgtatgtggcgtgacctgggtctgaacgtcgtgcaggtcggcaatccctacatcgagttctaagatgacggacgccgaaatctataaggcggtaatggcggagctcaaggcagctccgttcattacaaccaatcatgcactcacgacaacgaaatttgcaacgttcaaattcaagaagcgttcgagtgggtactacctcaacgttgacttgcattcatggccttcggagcacgagcgagtacgcaaagaattcaactcatggctttataagaagctgaaaccctatggttgggttccctacaccacttccggtggctgtggcgagtggacctaccgacttgatggaggaatagaattttgacttcggaccttaaaatcgaatcaatcaaaaccgtttactctgctctgaacattcctttcccggaaggtcaggatactcacctatatggtgtgctgaatgatctctgggaaacggctactacgaccgttgacgtcgaagcagtaaggcagcagtcttggcaggaaggatatgatgacgcacgcgaagatcatgcgtgggacagttcaagctgttgattgacctatccaggtcaaagatgtagactgtgagtgtggtagcggtaacactttattattggagtacgtgatttagatggcacacgaaattactgaacgtgcagacggcacgagtgaaatggcgtttaccggtcctcgcagcgcagtttggcacggacttggtcagcaggttgatgaaaatgcttccttcgatgattggaagcgcatggcaggtttggattgggaagtacacgaatccaccgtcgattacaccgcagtgagtgcaaagggtaagcctgagaagcattcgattccggacaagcgagttctgttccgttcggacaacaaggaagctctgggtattgtctcgaatgacttcaagatcgtgcagcctgatcaggtcattgagttcttccgagaccttgttgaactgcatggcttcaaactgagtactgctggatcgctcttcggtggtcgtcgtttctgggcacttgcagatgttggcaagagcgagaacgttatcgacaaggatcagattgacggacatctactgctgacaacggctgtggatggaacgatgtcgacccaagcgcgtttcacctcaacccgagtggtttgcaacaacactctgacgattgctctgcaaggtgcaagctctcgccctgtaattcgtgtgactcataagaaggactttgatccgactcaggtcaagatcgatctcaagctcatcgacaagggctgggctgacttcatgaccaatatgcggaagctggcaaacaagaagatgtctgctcgtcagactcgagagttcttcgaagagcagctgtacaatccagaacgtcgtgcagacgaacagacctggggcgtgaaccgcgaagtgacgcgtttgaccgatctggctctgggtggtagtgggtccggttactccaagggcacggcgtacggtacgctgtgtgcgattacggagcactttacacacggttccggcaagcgtgatccatctcgacagttctgggatgcttatgtcggtcatggtgactcgaagaagcaagacatgtatcgcaatctgttgaaggttgcagcctaaggagaaagtagtgagcgaagtaaagaaagtatcggtgaagattggcattccgttcctgcctcttttggcaattttgttcatcgggcttaagatgagcggaattggtgtcgtcgcaggatggtcttggtggtgggtaacgtcgccgctgtgggttcctgtagcacttgtgctgggtatctggggtctgatcattggcctgggtgcaacggttgttgttggttcctatctctatcgtaaagccaaaggaaagaagtaatccatgaagaagttctttgtagcaattctgatggctgctgttctggccaccactggttgttctgtggtttcgcctgatcctggtcaggaagctgttctggtcgccaagccaatgatcttcggcaccggtggcgtgctggatgaaaccgtcaagcctggacgcgagtttgtggcattgaccacagatgcgatctatgtggacgtcactccgcagaacatccctgtgaacttcgacgacctgtctagcaaggacaacatccttctggacttcgagacgaacatccaactgcaggtcaggaacgcatctcagctctacaagaccaagggtcctgaatggttcaagaacaacatccaggctaactaccgagccattgttcgcgatgctgtcaagaccaaggacatgaatgagctgatgtctggccaaaagacggctcaggaagtcgatgccgacgtgactgagaagctggttgcactggtcaaggaaaagctgggtgacaacgttgtggtgatggatgtctctctgggacgtgctaagcccaacccggatgttctgcagcagatgaacctgacggctgccgagcagcagcgtgccaagacgatggtgcaggcagaattggctgaacaggctcgaaagcagcaacagattgctaaggcagacgcagacaacgcatatcgagacaagatgtttctttctccagagcagtaccttcgtctccagattgccaacatccaagccgatgcctgtaaggcaagcaagagctgtatcgtagcgccgcctggcacttcggtgctcgtgcagtaagaaaactttctgcaagtaggagaagccacagaaatgtggcttttcttgcgtcaatcgagaactttctggcctacgaaaaggttgttccagaagtgcctgatctgtagactgtgtgagtggtaaacagttccgaaaaacaaatcactccaagaggttccgaaatgtctgagtatgtcgtcgttccgcaggtcaagggtctttcgaaggtgccggcttatgttggcaaccgtgtcgatggctaccagactgtctacctgaccgtcggaaccaaggtgaccaacgtctcgaagttcccctatgaactgaagaagttctacggcacgatcgacggcgtggtccacgtcctctggaaggactcgatcaagcgcgctccgcgtgtcaagaagggagaagaatgaaccgctggtgcaggttcttcgccaccctcggtctcggtctggccattgcaggcggattgactggatgcttcgagcattcgccgccacaagaagccagctatacccagaacggcattcaggttgagaagctgttcgtcaaggacggatgcacggtttaccgattccttgacggcaacattcgctacgtctactacgcagactgctcgcattcagcgtcggtggcatacgaagagaattgcggcaagagctgcacccgacccgtcgtgaacacttcatccaaggaacagtgatgcgaacctaccataaagacggcacccaggcagcaccggacgagattttcgtcttcggcagtaacctcgccggtcggcatggtgcaggtgcagcaaaagccgccctacagcactacggtgcgaagtacggcgaaggcatcggcgagcagggtcggtcgtacgcaattccgaccaaggatgaacacatccagaccctgccgatcgaactgatcaagccgcacatcgacgaattcattcgtcaggctggtcacctcttcaacacccgaaagtatttcgttactcgaatcggttgtggcctcgcaggctataccgacgagcagatcgctcctctgttccgcgaagcgccgtacagcaatatgagcttcccggaagagtggaaaccctatctcgaggactgagaactgttatgcagaagttgatgcgcgaaggaatcatcattgacaccaagcgtcggcaggagggcaatctctccatccaggttccgcctgtgccgtcagctgaagaacgttacggtgactactgcgccaaactggcagcacgtggtttgaccccgaaggtaaacagcttcccctgggcgtggaagggcaagaagaagcccaagacgttcctcagcaagaagcctaagatgcgcaagcgtcgcatggagacggtaccggtatgaacaaagaagaaatcatccagaagttggggcgggcagctgcaattgatatcatcctgcagcgcgaactgaccgaagagcaactccagctcgttctcgaggttatcgaaatctcgatggacctggcggaggcgaataccctcaaggcagttgaactccggaacgcagcgcaatgatcgagcacaagaaagatatcttcttcaaaggcatcatgatctttgcggtcatggtgtgtcattctgaccaagagacatatactgaaggcatggtgcaccgcgacggttatatggctgcggctcggaagttctacgagcacttcggctacatgactgccaaggaaacccgtgacctgttcggcactgacactccggtctggcctgaatggatgacggaagttttcatggaagtggagcgccgagttttcgacaccaccatctgggacaagtgatgaaccagcaagaagctcttgagaaattgatcgacgccgctgaccatgcctacaaggtcttcctgagtctggcagatcgcggtgaatatccgcaggagcttctgccttgggacggcgaaggcaaagacagtccgttgttcatgggccaccaaggtctgatgttcttgatcaacgcgatcaaggatgctaaggctgtaaagcagcctcaggctttcgttgcagacatgaagacttccgccggcatggaatactatgtcatgttgggcacacctgagcggaacgattcgctcttcatgttcaagagtcgcagccgtgcagagttcaccgctgccgaagtcaactattcactgggcattggcccgcagcccgacgtactggattacgaagaatgagattcgatatcaccactcgccagccctacagctaccgaacccgaaaggtaggtttcttctgggatacctacgacatcgtctacgatgaaactgtgattcgcgaagtgaaagacgagagtcttgcgcgagaagtggtcgtgcttctcaactgtgcctatcgcgagggtcacatccaagctcagatggaggcgatggtcgatgcatattgatcttgacaagccgatgactgagctcaccgtacgagaatacgcctggctgttagcatggcaggctaagcaagtgacgggaatgcctacaggtgaaagggtgcggtggatggcagatgtggcgatcgcagacctggaagattctatcgaaaaagagatgaaataatggacacgaccttctatcaagaagctatcgacgcacttggcaacaccgagccggaaggcttcgatggttgctcaggcgttggtttcatcgacggttgtaagaggatgggctgccacaacgaagctgacgaggccaagttggttgccttccgaaaggcagcaatcgagcaaaaattcgtaggctgagaaagccaaacaccgctgtataatgcttcgacacactttgaaaaggtaattgatcatgacctacgccgcacaagctgctaccgaactgctggacgctctgcatcacgctcacctgctggaaactcgtcagcgagtttacgagtcgattgctgatctgcgctatgcagcacgccacgaagtcgaagtgatgctgccgactctgaaggctgagatcaagcgcatcggcaaggcgctggaagatgctcgcgagcgcgggctgaaccatggcgacgtgatctacgatgagctggttcgtaccatccgtgaagtgaaccacgctcgtgctcacaaccgtcagcgcatcaaggacctggcactggatcaggcaatcaacaaggctgctctggcagaactcaatcgtgagatttcctacttcgaggctgagggtctcgaactggaagtcgagcagatcatcaactaccactgaggaacaagacatgttcggatctcttctcaaggcagccgtaggcgttgccgtttcgcctatcaaggtagcagcagacgtcgtcaccctgggcggcgcgatcaccgaccgtcgtgagccgtacaccgtcactgctgttcgtgaagtcatggagaacctggaaaacgctaccaagccggatccgctgcggtgaccgcctctatctgggctagcaagccgcatcgcgaagacctctacgctgactgtctcgaccactggggtgcacctgcccagaccgatatgctcgtcgaggaacttgctgagctgatcgtcgcggtgcagaagtacaccaagcggaaggccacctacgacaacttcgatcacatggctgaggaaatggctgatgtgattttgatgatcgaagagatggcattccatttcaatcaggaaggtcacgcagaagcgaacaagccgtttaccgaaatggtcgcgggttggatggctttcaagtgcaatcgaactgagcagcgtctggcagaatccatcgcacgtcggtatccggaaatcgaatgaacgcactcatggtgacatatttcgtcgagaacggtatgggctacctctttgagcagccctccgagatcgctcgtcctttggcttgctcaatgacaggcaagccgatggcatggcctttcagggtggtcaagagctttgtccgagacgacgaatatgtccctgtgcttctgcaagaggcagcaaacgcatgatcaatcgatataagctcgacgtcctgctgacggatgaagaggaagacaagctctgggaaatgaagaagaacaacgacccgctttatggtcgtcgtatcagcgaatatttccatgtggttgaacacaatcggggaatgcagtttgccattgatcgtctcaacgaagcctacgccaacgactttgttgatgagtttggcattgacttcctggatggcagcgagtacgcgttcatcaccgacaaccatgacctggcatcggaactgattcgcatcctcgagctggacttcatctacgacttcaaggctgacgtcttcatctttgatatctgggcatgccacgaagcatggctgtcctatctgtacgagcgattcaagggtcgtgttcgcggaaacatgcgcgcgggtgatgtggcagaacggtatgtacgagaaggctatggcatctatcaatcgagccagtcttatcgtatcatgatcggcgagaatgttgctattccgtcgttcctgagccaattcaagagccgcttcctgagaatctgaaatgaaccttatccactgggctgaccaacacctcgactaccgatgctccttcatgccaacgatgctcaacatcaatggcgaaactgagactgttacagttcgactgaagagtcggcagttgtgtcaagggtcgagaatggtaaccattgtgcgagagtccggtgaggttattgaagtgtacctggatgcccttgagccgatgaccgaaagcctgtattattttgatacgcctgacggactatctggttcacttcttattccatttcctcaggaaaccgacgacggctgctaacggagaacactttgacaatttctgcaaaaatcattgccgactcgatcgacccgaacggtcgtcgaatcacaacctacgaactggaatacccacgcttcatccattcggagttcatgacccatcgtctgttctctcgcaatgctgcatcgagccgtgcaattccgatcgacaaggcaattcgtctgatcctggaagacaccgctgcaccgagccattggggcaagaatcagccaggcatgtctgcaaaggaagagcaagatgagcctatccagctgaccaagggaacgcgctattcgattagccgacttggcgcctggaattgggcacgtgaccgcgctgttgaagctgcgactgccttcgctgatgccaagtatcacaagcagatcatcaaccgtttgctcgaaccgttctctcacatcaaggtcgttgtgactgcaactgagtacgacaatttcttctggctgcgaaaccatgctgatgctcagcctgagatcaagattctcgctgagaagatgctcgaggctcgctcaaaatccttcccgaagctgctgcgcccaggagactggcacgttccttactacaaaggcggtcattggtttgcaagtggatatgctcgtggcaaggaactcgaggaagtcgatgacaagcgcggcggaagcactctgaaggaagcactggctatctcttcgtcttgctgtgctcaggtgtcgtatcgtgtgctggatgactcgcttgaaaaggctcaggacatcttccgtcgtctgattgatgcaaagccggttcatgcttcgccgtttgagcatcaggcaaccccgatgaaaactctgtacgatgagactgaaggtcctgtctacaactgggatgaaggtgtaactcacattgaccgctacaacaatggttggtcaggaaatttccgtggctggattcagcatcgccagctgatcgaagacaacgtctgttgggactatcatgagcatcagtagtggaactatcgtcgtagaaacacctgagtctatccgttgggaccgaaccatccgcaattggcgatggtggacagtcattccgatggtgttgcctgcagcactgatcatgttcgtcctctatccgctgcactatgttctgtggccaatcggacaatggatctgtaccctgtccaacaagctatactacttcaagcctccgaagtgggtcaagcgattaatggattgggcgatgaagaaatatccggaggaaacagatgaagagcattgaaggcaagtacactctacccaacggcgaagttcttgatgtgcatctgaacatcagcgttggagtcaacacctgggtcgatggcgcatggtgtggcttcaacgaagtgtctcccgaagacttcgcattctgcatggaagagatggcgaaggaaggaaagatcatttttgagcccaagcataatggaaatccagacagtaattgacgacatgaaagcaatggcatctaaatgggatgccattggcgcaggcttccaggcaattccgattcatacgtggatcggaatgcttgagcagtatcagaagaaacagaatccgcctgaacctcctaccgagcagaagattgatgactggcatctgcctatcgtaggttcggacacctgcctgactatcaaaggtcagagtcgttggttccgttgcacagctgacgattgcggtgcgaacgtcttctctaagacgcgtgatccgaattactatgtctgcaatggttgcaactctggctacgaaacgagcaagggactatgaaaaagattacttcacacaaggaagtcaggtgtaagactcctcaggaactgtctgacctgattgctagccttgctggctctgaatggtcactagcagcattcccttctacctttcttgatggcactgctcaagtttcactcgtgaagatcgatcttgttgaatacaagttctcagacaccgagatgctcgactggatggaacggaacgaggcggtctttagcagcacccacgacaacaccttcatggtttctatgcggctgcgcgaaagcaagaagtatggagctctagcgtgtggtctaactgctcgtgcagctatggagaaggccatgatcaacatcaaaggtcaccaataccttttcgaggatgagagatgatatatcaagatgcaagtggctttgttcatcaaactgcaagtatgaccgagctgctcaacctgcgtgaactgatcaatcttcggattgaagagaagcgcaatgaggacaggactcagatttggcgagcctatgacgatgcaatgaccattggttttgctacgaatgagcaactacctcagctcctgaaatggatctcagaacgtgctgagcatatctccgaaaagctcgttgttgagcagtatttctgtgtcaactctgaggttgaggattggcttggtagaggttggttcctctaatggcagtctacgtcgatagcatgagagcgcaatatggcagaatgatcatgtgtcacatgctagccgacactgatgaagagttgcatgccatggcagacgcgattggcgtgcaacgaaagtggcatcagaaagctggcaccgtccatagccactacgacattgctctttcgaagagagcattggcggtccagcacggcgctgtcgaggtagatcttcgtcaggttgcctatataatacgtggtaaacgccaacgcctaaaaggtgacacaccatgaagaagtttctgatcgcactgatgctggttctttcgttgggtggctgtgtgagccgcgaagagtacatcgcagaacaagaaagcaaaaccacgaacgaccagtgcctgcgaaatcagattttccagcagtgtctggcaaccattccgccgggaccgcagaagactgtctacaacgactggaacgaagttgtctcggagtgctcatctgttgcctactatcagtcgctccgtgttcgtagccaggtgaagccagaatgtcgagcacaatgagagacatccaatccgaagggcgcatcgagaaggcagcacgatacaagtgcgaacttctcggtcttgatccagatgaagcgctctggctcgaagatggtcggagcaagaaggaaaagcgttggatgcgagttgcgcgtgagatcgaaaacttccgactcaacctgcaaattgtatcaatgttccttggcgacgaagtgaccagtcctgtatcataagtaatgtagattcacatcgaggcatgttcaatgagtaagcgtttcgtttcaacaaaagaatacaaggagttggctccggttgcatatcgccagtggcgcgaccaaggcaactgtaatctgatccacggctacgcgctgtcgttctatttcgagttcgagtcggacaatctggactctcgtaactgggttgttgactacggcggtctgcgtccgctgaaggacttcctggaagagtacttcgaccactgctatctcctggcacaagatgagccgcactatgatgcgatcaagaagctgggtgacctggggctgatgaagatcaccgaagtcgaagcaactggctgcgaagcgattgcagacttcctttacaagtacatcaacaccggcttccttcgcgagatcggtgcacctgcagacgtttggtgtcgttgtgttcaagtccgtgagacggaaaagaacatggcgatgcgacttggtcatcaagaggacaacgaagacctgaccgtcgacctgtctaaatatcgcagagacggctgatcacggtgtaggcaatggcatcacaacccgcgcatccagagcaacgtaagatccttacgaagttctgtgaacaagaacttgtacgtcagcgggactatctgatcaagaagtataagctgagagactacaatcctcagcttttcttcaattggaaaaggaatgcagtccacagttggggcggatcactcgaggatgatataccattcctcatgctgatgcctcatgagatttggcagcacgtcggcaagacaggaaagtacatcttcaatgagtacgagttcctgcatgacaagcctggcatcggaatgggcagggcgaactggaagcagcacatctcatggactatggctcacgaattggctcacaccatttgtgagattgagcgcttcgcaaagaaagctaagaaagtcttcccgggacagactgcaactgagcatgatggtcatggacccttgtggcagtccgtctattatgatctccgtgtacatcactgccgcgaggaattctatcctgttgaggagatcgacttctcaaacgaggtccactactcgcatcacagggaaaagggtgagcaccgctttgtcttctacaaggggaacaagccattcgcatggtttgtccgcactgacggggtcttctggcagaccacgtcccgctggcggaaagcgggcagggccagaaacggggccagaacccctcgagaactgaccagaaatctccagaattcgtgactttttgtcctgagagttgtaagtgtctgattcgtaaggttgtcctcaggacagaaagaacttaatatgtggttgtgggacaaacactcctcaacaaacacaaaggacacgaagatgagcaagttgaccaagacccagaatgaagccgtcgccggtgccgtgaaggcagtcactggcttcaagatgggagcggagacttccggggtgcagcatgtggaagccggcaacatcaccagccgcagcggtcgtaagtggaagaccagcatcgccttcaccaacgacggcggcaagctcaaggcggacctgaccttctccgaagtcggcgccaagaccgagaccacctactccagcgagaacgctgccggcgagaagctgcgcgaattcatcaagtaccgtggtcgccgcctctgcctgaagggcgcggacatccagcgcatccttcgcttcttcaactccatcgtcccgaccggcgaagccgcgaagccggcgaccaagaagacgaccaaggctaccaaggctaccaagccgaaggctaccaccgaagccgtcgccgaaaccgccgaagcctgagccctacggggcggcgcaagtcgccccacctttcggagaacgaacaatgccccgtcgtatcagtctactcccgcagcaggcactggatttcgctcagctcccgatgatcgtctcaggcgatgacgagctggtcgagaaggctctcctggtaaagaagagcgatctacctggcgcctacgcatacgtcacagtcaccatggtgacgcgtgttgcggggaagaccgaggacatccgggtctgcgttcgtaaggaagtcgaataatgaagatcgtgatccaagtcctcgatggtggctggcaggaccagtccgaacatgacaccatcgaggacgcagagaagatgatggacgtggtacagggaggcgatcccgatgcctacgtccgtatggtgcagttcgttccgcgcttcttcgctgagtaccagaagcctctccagctgggcagtgacaggacctacacgcacattctctacgtagccgagtaccctgcggacaggagcatcaagtcctgcaaggcgcacttccggtctcaggttcgcaagttgcctgagttcaatgatccgacgttcaaaatccgtcacgagtacgtcaaccctctgtcgtattgaggtaacctggagatcgtcatgaacatcttcgtcacgcacctgagtccggttctagctgcacggaacttggacaacctgcgtctgaacaagatggtggtcgaaaccgcgcagttactctgcaccgcgcatcacatgaaacaaggcagccgggctaaggttctctacaagcccacgcacaagaatcacccctgcgccatctgggttcgccagagcaacggcaactacaattgggcatatcgtcacttcgcggctctggctgcagaatttgaaagccgcaacggcaaagtccacaagacctgggcagatttgaaggacgtgctcgagaacgccccgaagggcatcaaggacgtcgtccgcactccgttcccgaactgcacgccacacaaggacatggagctgatcgaagcctaccgcctgaccatgaccgagaagtggcaagcggatgtcgaagctggtcgcacgccaaagtggggtgagagattgacaccaccgttctgatcgaacgccaactagaaactttctaaaagcgccagagcgaaagcctggcgcttgacctatctatggtgcccgcatatcataacggtatggagacattattgtggttggcagttacattcttggggccacttgtactggccttcccgccagcattgaagaggctggtgaactactaccgttggtcgaaaactgtctatgttgaggacctgattggatatctcttccgaaccctttggccaactctgatcccggctattggatggttcgttatgccaggactctacttcgaagagttcgttgaaccgattctcaaaatcaagctcaagggttgatcatgtggccattcagtagtcgcaaggatgcacaaattcgttctcttcatctggacctggcaaagaaagaaggtgagttgtccaaagcactgaaatcacatctcgaaactctcgacaagtacgagaagggactcaactcccagatcgcgctgcttgaagtggtgagccggtggtccagacaactagaccgagataagagcatgagtgagactgatcaaggcttgttgaaagttgtactggaagatttctccaaggcaatatctgagcattgtcagcacaagaaatgggtcaagactgatcgacccgatccaatgttcccaggcgactggtatcaccagtgtgaagtctgtggcaaattcgactatgaggtctaaggaagaaatatgcgtaagctcgtaaccctgcgtactgtcgcagaaattgttcccatcgaaggcgcggatgccattgaagtggcggtcgtcgacggctggagctgtgtggtcaagaagggtgaattcaaggaaggcgataaggccatctatttcgagatcgattcgatcctgccatacggtgacgaacgttttgccttcttgatggcccgtggctgcaagatgcagccgactgaggatggtggtctgctcgaaggtcatcgcctgcgcactatcaagctgcgcggtcaggtgtctcagggtcttctgatcaagcccgacgatgctttctctgacccgactctctaccttcgtggtatcaatgtcgccgaaggtccgttccttgactaccggcattcggttgaaggcgaactgaagcgcatctacttcaacgacgaagagaacaatgacctgtcggatgtcttcggcgtcaagaagtatgagaagcctatcccggcacagctcgcaggaatgattgcaggcaactaccctgtgtggctgccgaaaacggatcaggatcgaattcagaactgcttcggtcgtgcgcctgaaggcaagtaccatgccgaagagaagttcgaaggttcctcaatgaccatctaccatgatggtgagaagcttggtgtgaccagccgaaacctggacctcaagctggaacaggaaggcaacaccttcatcgacgtcgccaaggcaagtggcatctttgatgcactcactgcgtggattgctcgcttcaatcaggatgacttcattcctcgcattgctattcgtggcgagctgatcggtcctggcgttcagggcaacatctatggactgacggcacatcgtttcatgatctacgatgtctttgctcatgaccattacctgacgcctctgggtcgacatgtcttcctggaagagttcatcaagccgttcgcaggaaagaatgtaggctatgtccatactctgttcacgatgactcgaggcgaatacgctacgaaggaatcgtacaaggagttcctgggcaaggcaacaggcaagagcattcttgcggacacgctgcgcgagggaatcgtctacaagtcagacatccagcaccgcggtgacgtgttctcgttcaaggcgatcagccctgaatacctgctgggcgaaaaagaatgaacgagtttgtcgcctctctgatccttggtgtcatcggctttgtagtcggtggcatcattggcactatctggttcacaggattctttcctgctgcactgattggtctaatcgtcgggttctgcatcttgtggtgcccgtgtatcctaatgcatctggactgaaaccatggctgatatctttcaaagggaagtgatcgattcgttccgcggcgaccacgaattcctctctaacttctatcgtgagatgatggaatacgatggacatgtttgggcgactgcggaacacgcctaccaagcatcgaaatgtgccaaacaggatgagtatgatctgttcctgaatcctatgctcactgcaggtcaagcaaagcgcatgggtaggcatgtggacatctggaagaactgggaagcaatcaaaattggcgtgatgcaaaagatcatcgaagccaagtttgaggcgggtacggcactggcagccaagttgctcgcgaccggagatgcaatcctcatcgaaggcaatacctggggtgacaaattctggggacagtgcgacggtgaaggtcacaatcatctcggtatgattctcatgtaccataggggcaatctcaggctggagccataatggaaagctatgaaattatcaggctaatcaataacgaacggcaaaggctctgggaagaggacagtgcaaatgaagtcactgaccaatccattgttggtcagattagaactgacctgctgacacgggaagagtttgataggaactgtgcgcgatatgctgattgggcatactacacgccaccggatcgattcgttttccactactatgaggatggcgttgaggaagctcgcatttgtgagcgcctgatgctaggaatagaacgatatgtagtgtctggcgtcaacggtggccactatggaatctacgacacccgtgatgtaacgttctatctgaaaacaggtacatggattgaaattccatcagacgtgttctttgctcaggcagacgttgatgcggctcagaagaaactcgacgaagcaaaacagcgactcaaggatttaaaatgattgctattccacacgatatcatcactcacaagacttcctggcgcgccgctatcgaactggcgattgcgaattccccaccgagggattatgatcaagacgatgctgggtattggcgccatgagctccagcgcttcgatgaagcctatgcccagctggaagcgatggacctagttcttctaccttaagacaaaacgccaactcaaggagtttgaaatggcaattgaagtgatcggcaaagacccagcgcagtatcgtgagacgacctgtaggaattgtgcttcgattcttcgtttcgttcttgctgacgtacagaagaagcaggtgagcgattacaccggcgatacagacactgtctattacgttccttgcccttgctgtagcaaccaagttagcacccgaggctactaatgagactactctgccgtctaggcattcacaaatggggacagtggtccaaccgttggtacaagaagtacatcatgcttgacccgtgggactttgaatggactgaatatcgagttcacagaagtctgaaatgttcagagtgtaatcatcagaaagataagtttgtcgagaccctgacagaagtagggtctgcgcttaaaggaacgaatcagcctacttgggactgattcgctgttcctagtgcggcagcaagttctgcctttgatgagtccaatgcggttgcgagcttctcgagcagctgtgtcagcatcgtgttttgaattcggagttgctgttctttggacagcagctcttttaccttttccaaacactggtctgcctcagcgccgatcttcataagctcagcttccatgtccgctttctccttgcgggcatcgtctctttgcttgatcaggtcctcgatcaagtttccttctgcacggtcacggaccaactctagcttatcgcgggcgaggcgacgcaagaacatcgtcgctccacctagcgcggctacgactgatccgccaatgattgcaggggtgattggttccattactttaggatcaggttgaggacaattctcttccaggcaggaaggtctttttcttcgtgccactgtctatggctaacgaggtcgccttttggaaatcctgtttcgatcaccgtatcaatgcgtcggttgatggcttcaattgagtttcttgcgtcatcaagacgcttctcgaagctttcgatcgacacctggacttcttgcacgatgataaggatctgagccagtaggctttcggatgcagcttggtccatggtagtctttaagggcggatgggtatcgcgatatttatagagaaactttactgaaccgttatatgcagaggtcgtgaaggaagtctataaatatcgaggatatcgaattgataaggatcgagccttgattaacctagaccaactctatgctcgcaccccggtcactactttcaccggcgccgagattatcgcggtccagaaggatggcgtgacgggtgcatctgttctgtcgacactgaagaactttctgaaaagcggatttgttgccaacgatgtgagtgatgcaacgactgtaggcaagcagttgatgaaggttgcatccgtttcagcggcaaagactctccttgaagtgcctgagccaactccggagccgttggctcctgtttcactgactgcaagcactacccttgcaaagacacacgccaatcgccgagtctttgtgaaagcagctgcaaccctcaccaccaatgcagctgtaatcgctgatactgacacgttcaccatctacaatcttcatacggctgcggtaacgctgactccgaagagtggtgaaactttccgcgtcaaaggcacaggatcagcatcgacctttagcattcctgcgaacacgagtgtgcgagttttcctaatcgacgccaccacttggttcatcgagaattgatagatggatgacctaatttctcttcccgtagtaacagatgacttcgacggacagacagctgccctcgaccaagccatccgtgaggctgcggttgcattcaatttcagctatttggcagacgctcctacatttgagcagctctaccatgttcctgatcttgtctacaaacttgtcgaacactacacgatgcgaggcttcatctgcacctacgatggtgaggcaggtaagctaaagattgcatgggatcacccaaatatgtcctggctcgaggcgagggaaattactcgtgcgatcccggaaatgatcccaaacctcggcattgcattccgtgctggtctgctctatctctgcatgaccaacggtaccgacctgcgcgccgaatccgacttcaccctgcagactaagctcggaaaggaaatcaaggctgctgctactctgggcaacctgcagctttccttcggcttcccatctgtgccagctccagctgttcagaacctctttgctcctaccttccaggttttggaagaccaaggctttgagatcacctacagcgcaaatgctaacatcttccttttgaagtggggcacaagcatggcattgaactttgtatctgggcaaacactcgaggttgtgctgtcttgaaaggtctcgtaatcggcaagccacactctggcaacgtctgcattaggtaccgtgaggatgcgtcttcgacggacttcctgccactgcaaccaaacccgtctgagccacctatcgtcattcctatcgaaggaactggcgatatgttccgtgcgatctacgacaaggatgctaacggtgtagttgacacagccgatgaagttcctgtctcacacattcctggccttcaggataccatcaacgacatctacaaccaaattggttcgggtggcggtggaggaggaaactcacaggtcatcttcgtaaccaacacaggtggcgagacgttcctacctggcatgcctgtctgtaaggtcggtagttcctacctgcgtgctcgctccactggtccaagacagacatgccttggccttgctgttgatgcgtcaaacccaggtgaacagctaaagattcagcaggcaggtctattcactctgtctcctgaaaattgggacttggttaccaatcaggttggtggccttggcacgacgatgttctattacgtgaacatggattcgcaattgaccatgactccgcctaccgacttccctgagtaccttgtaaaggtcggctacgccttaaataatactgacttcctgattgaccttgacttgtcaatcaaactataagagacggacatggcagacttcaaaccccttaagctaggctctaacaacgagctgactcgcttccagaccggagacagcgtcggcattgacgccggtggtaccggttctactactgcggctggcgcccgtacagcccttggccttgccatcggtacggatatccaggaacacagtgacaaacttgacacgctcgcagcactagctggcaccggattcctggttcaggacggcgcgaatggttggcttgcgcgtaccgtagcgacggcctctacaactcgactgactgttaccaatgcgaacggcgttgcaggcaatccaacgttcgacctcgccacagtcaccgacagtggtacaggtactttcaagaaggtaacggttgacggatacggacgcgtaactggcacttctaacgtaacgacagcagacatcacagcgctcgttgactcgacctatctgaagctgtcaggtggatcgctcacaggtttcctgacgctgcatgctgatcctacgaatgcgatgcacgcggtcaccaagcagtacgttgatactgtgatggcgtctggtggtattcctccgttcgctcctgcaaaggttcgtaccacagctaacatcaccctaagcggtgcacagacaatcgacggcgtttcggttgtcgcaggtgaccgtgttcttgttgcacaacagactactgcttcccagaacggtgtctatgtcgttgcggcaggtgcatggacacgcgcaacagacgcggatcagactgctgagttctctcctgcacgtcaggtatttgtccagcagggtacactctatggcttcaccacatggggcgttggtaacacgactgctcctgtcatcggcactgatgcaatcacattcgtgcaggttggtggtgctgctcaatacactgcaggtaacggtctcagcctcacaggtacgcagttctctgcggtgggcgtttcagggcagatcactgtcactggtagcggcattggccttgcaacttcaggtgcaacggctggtacctacaccaaggtaacggttgatacctacggtcgtgtcactgcaggcgcgacagctactccagccgacattggcgctcaggcttcttcgactaacctcaccgcgctgtctgcctacaacacaaacggcttccttgtacagtctgcggctggcacattcgttggtcgctcaattgctgtggcttcgactacacgtctgaccatcaccaatggtaacggcgtatctggtaacccaacacttgatctggctaccacaggcgttacagcaggtacctacaacagcgtgaccgttgacgtctatggtcgtgtcactgcaggtacttcgactgcttcggatcaggttgtaacctcgctgacaaacggcaacgcaggtgcgatcgtcattggtcgtgcagtctacatctccggcgccaacacatgtgatgtggcaaacgccaacaactatggcacggcaagcgtcattggtatcgcaacctcggtgacaaccgcatcaggtgcagcagtgaacgttgctgtttccggtgtcgtcactgcgacaactgctcagtgggatgtggtaacaggtcagtctggtggtttgaccacaggtgccaagtactacctctccaacacaacctcaggtgcattgaccacaactgctccagttacaggcatcctggctccggttggtatcgctgtgagctcaaccaagctggctctgcgcctcgagcgagttgttgttctctgatacacaatcaaacatcggttgatacggaagaggagcctagtgctccttttcctttgaataaatatcgctgtattacaggacagaataatggcctccatcaagcctctttatatcaatgcagcaggactcgaggctcaggcagcttcgggcgacacagtaccggttgattacggcggcaccggtctttcctctctgactgcaaacagctatcttcgtgcggtgtcaagctcagcctttgagctccgcacaccagcccaggttcttgctgacattggtgcgctgtctaccacaggcactgctgcttcggcgactatccttgcgactgcgcgtaccatcaacggaacgagcttcaacggctcagccaacatcacaacttcaacttggggtaccgctcgtaccttgacgattggctcgacaggaaagtcggtaaacggttctgccaacgtgtcttggaccctggctgagattggtgctgcaccaactgtccatacgcatgtatctgcagacattactgacctgcaggcacagctaagtggtcgagttcagcgcggcacgcttcagttgaatccggatggtacagcacctgccacattcttcaacgaagtatctgacactctcgcactcaaatattctaacaactctacaggttccacaggatacccaaccgagtttggtgcgaccctgtctgtgatcatggaaaagcagtcaacacgttcgtttgacctgcatatgccaaccaactcggctaataacctctacttccgaggctattcgtcggcaggtacaccaactgattggaagaccattggtgccttgcaaaacaccaacacctggactgcaaagcagacgttcgcaggtggagcgaatatggccaacgacgtactccttgagtacggttcgggcggtgcaacaatccgtggctcgtccactgggtcaatcatcctggcttcaggtgccgctgcgggtgcaggtattcgccttcgcccaaacggtgacactagcctcactggtcaggttgccattgacactgatggtatcgtagtagcaacaggattcagcggtccgttgactggcaatgctacaacggctaccacacttgctactgctcgcacaatcaacggcacatcctttaacggatcagctaacatcactaccgctaactggggtaccgctcgtactctaaccatcggtggcacaggtaagagtgtcaacggctctgccaacgtggcatggagcctggctgagattggtgctgcatctgctgatgacatgcttttgatcggtggcgacaaccaaatcggtaacggtaacttctacacaggcacagctacaggttggtcgggtggcagtggtagcatcggaagcggaactgctgttcgttctatcgttgatagcactcttgcgagtacgggtaaggcatatcgaatggatattgccaacttacctaccgcaggctacattgaaatcatctctaacaccaacgtcaagattgctcgtgttcagggcggcgaaagagctgtggttgcagcatacgctcgcggatcggcaggcgttcgtgtcttcctgcaaatccgttggaatgatgaaacaggtgcagctatctcctacactggtacacctaacaattcatcttacctaacgtctgagacctggacaaagtacacctacagtgctacggctcctactaatgctgtatctgcaaacctttatgtccgagtctacggcaacaccgcagctgatcaatggttcgagacgagccatatctcaatgcaggttggcaatgtaagcacaggatatgctccatccattgatgagctgcgcaacgatttcaacaacctgatcaccactccaaatgtctggaatcaattgcagacattcaacggaggctggaccctaccaaacaacaagatggggttgctaggcactggtggaggttcgatccgaggaactgacacaggtagcgttgtactgtcttcgggaacaggcggcagcggtttcatctacgttcgtcccaacggtgataccagcacctcattccagacagtgttctatgccacaggcaatgtggacatgccaaccgttcgtgcaggtgcatctactcctaatgccgctggagccgtgctacttgaattggtaacggaaagatcatggcagttccgtcagcgcaacacaggagcgacaactcagctagaattgtttgatattactggagctaaggactttgtcctgtccaacacatcaaacacgaacgtcattgtgatgaacccgacgaatagctcgatcagtgcaacgacgttcacaggcgcattgactggtaacgcgacaaccgcaacaactcttgcaactgctcgaaccatcaacggtacatcgttcaatggttcggcgaacatcactacatcgctttggggtactgctcgaaacatcacaattggttcgacaactaagagcgtcaacggttcggctaacgtgtcttggaccctggctgagattggtgcggtagacgcaaccggctttgtcaagaaggtcggcgacactatgagcggtgacctcactgtttctgcaaatgtcagtggtcagatggttcgtgcaggtttctctgccgaccttgcatttgctcaggtcagaacccttggcgacggttcaagtatcgtttggtgggaatccatcctgaagagctcaggcggtccaggaggtgagtcttggtaccgtgcaaagtctcacgtatggacgaacgatcagggtaacatcagtgctactctggacacatcaggcacctttaccgcatacaatgttcttgctgcaaaaagtttctctgtcacagattcaaccgcaacaagcttgatccaaggaaacctggctatcaacgatagcctaaacgccaggggcgtgatgtacttcggtggtaaggttgccaacaccggaaacaagctccgtatcctcaacccagattcttctacctctttacgaattgatgctgtgactgcagatgcgtctgcatttgcgcagatgaacttctatgcatctcagttcacattcatcgttggacgaatcggattcaacggtcaccttaactcgacagccactgcagctgttctttctgctcagaatggcggcacagtataccttcgccctaacggtgctgacagcgacactggtgcgacaatcatcggaaccaacggtgaaatgaatgtcagcggtagcatccgacttggaggtaacggtcgtaacattcgtttgtatgataacaacgcagacactgcttgcgttgacattggttcgggtattggtacaggcactgaccgtggcggatatatcatcaaccgaaacgctggtggtgaactatctctttgggctcgtaacggtggtgtccagctgcgcctcggtcttagagacggtgtcgcaggtgctgtagcacagctcaacgtccctatgctcttctctgcaccagctatggatcctggaaacgctgcaacctggtcgatcctaactacaggttcctacggtggcggtatcggtatgcgagacaatgcaggtagcggaaactacttcggtggcatgtatgtcggctccggtcagatgtacatcggttgtggtgcaccaaatgaggcaggtattcgtgcttcggttgtgatcaagaacgattaccaatggtacttcacaggtaacactatcaacatcgaaggttcctcgcctactatccgtgtctacgataacgatcaaggctacaccagctggatccaccacaacgacggtaaccatggattcctggcacacaacagcttctcctgggcatgtttccgtaactcagggaatgactggcagtgtcagaacaacatcatcgcctacgcatctgatagacgccttaagaagaacatcgttgatgcaccaaacgatatcatcgagcacttcttcgagaatgtccgcatccgacagttcgattgggatgaagagaagattgctcactataaggtaggcatcaaggcacgagttggtgaggtaggtgcagtggctcaggagatgcaggcagtctattctgatgctgttgcagtcaatgaggcgcacaaccagatcaagaccaaagacaaccctaatcctttgaagccagacttcttgaccattgactggacaaagactgttccgcttctgattgccgaagtacagaaccttcgccgcagagtagcacaattggagaaccgagcatgagctcacgagtaatcacagaagaaagcatcacccgtattcgcgagactgttgcacctaacatcacgattcaatgggatccagtaaccaatggaggacaggtaacgttcttcatgcaggatcagatcacagagaatggcgtctacaaaggcatgcaacctcatcaaggactgcgccctaaggagaactctcttgatatgaagggtgtgctcattgtgcctatggaagagatcatgaactcgaccattgtgacatcctcaggtgaaacgcctggttatgtgctgatggttcttatcaaggcatactttgagcaggtattcacggatcgtctcaacaatcaggacgctgcggatgcactcaagggcggtacaattcctgtcgaagagaaggcgagcctctaatgccaattccaggttcgggtgcaatctcatttgcagatctaagaaacgagtttggcggtggtaaccctgtaagaatctcagactacttccgcggcggtccgcgagttccaaacacaggaacaaacgcaggcgtaccaacaagtggaatcgtctatctgtcgcagtatcgaaatgcgagtgcatctacaccactgactgcatcggttccggatatctacgcatcgcgtctcccaaacggttcggctacacgttcaacaacagtgactgcatctggtggtacaggttcctacagcctcaccaatgctgttcttttgtcaggtagtgcaacagtttcccgaagtggcatgtctgtcaacgtgacagcatctgctaccaacgctgagagaaacggttcggttcgcgtaaccatttccgatggtgcaaccactatcactcgcgacttcaacttctacatgcaattcggtacgccgctctaagcctgtaaataatggacaacgtaatgatacattgcccggagtttacccaatgaagtttgccgcattccaaaacccagctgtttttgatcttctgaaccgcctattcgtggctcaggtgcctgtcaaggtcgcctacaagctcagcaagatccagaaggctgtgaccgttgagtcggaacgttaccaagacctgcgcatgaagatcgtgtccaagtttggtactaaggacgagaacggtgagctcatcgtcgacgaggcaggcaatgccaagatcgaggatgcagccctgaatgacctcatcgaagagatgaaggaactacacgacattgacgttacgctagagaacaagatcaagctcgatgacctcgagaaggttgacctctccgcaacggatctgtctatcctagaaatgttggacatcctagaagagtaaagatgcaaaagacaaaagttggtcgttatgtctggaatatgctgatcgccattgatcagtttttcaacacagtgtttggtggtgacccagatgaaacgatcagcagccgaattggcaagatcacagctaaccgcccgaagtcttgccaattctgtgtcttcctttgcaaggtattgaacaggatcgatcgtgaccactgtaacaaggtcattgaactcgaccgaggttggagagaggtaatcaagtgaccatgagcactgaaactgtagcaatcaagatgggtgcacctgcggatgtcgcacgagcactcgagaatgcctgcatcaagtttggcatcacaacccagaatcagaagtcgcacttcctcggacagatctttgttgagtcgggtggcttcaagacactacgcgagtcgctgaattactctgtcgaaggagtgatgaagacctttagccgtgctcgtatctctgaggctgacgctaagaagtacggacgcaccgcaacccaaaaggcgaaccaacaggcactcgccaacatcctttacggtggcatgtggggactcaacaacctcggcaattccaaggaaggtgatggttgggcgttcattggtcgtggcctcaagcagctcacaggtcgttccaactacacagcttgctcgcttgctctgtatggtgatgatcgccttgtaaagaatcctgctctacttgaacagcttcctgatgcagcactgtctgcaggttggttctggtcttcccgtggactcaactctctggctgagtctaactcgtatgaacaggtcactcgcaagatcaatggtggccttaacggatacgatgcacgcgttgcagcaacaaagaaggcatacgcgctcttcgaatccctaaagggctaagctatgtctcaagcaacacttcaagccgcaactctagctatcctcgcaggtggcgcatcctggacacagggcgcccttgcacgaaaggctgatggtctaccatgttccccgttcaatgaagatgcagttacatgggacatgatgggcgctctgatcaaggctcaactcgaatccgacgagcctaactggaccagctatcatttggtctacaacgcacttcgagatgctctgcctgccgactacaagagcagagacatcgaagcttataatgatgacgcagatgtcgtatggggcgacatttccgctttgttcgcctgattcaatcgaatcaactcaatccaacccagactcaaaattgaatattttagaaatattctgagcacaatacaaggttgtttggcgtaacatttctgttaccctaaacggcactgtaaaggagacagattatgaagaaatttgtaattttgtttctgctgctgatcacttcaactttttcaacattcaatacacacgcagccgaaacgatcatcatgcccgaagtaatcctggcacctgcgccagagattgtcgtggatacatccatcaaggtacacactttcgtacctgacctctcagagccagacatccttgtcgcagctctacccagtgaagcagagcttcgttgcctgcagaaaaatatctattacgaagcccgaggtcagggcaccagcggaatgacagcggtcgccaatgtgaccatgcaccgcactcaagacagtcgctatcccagcacagcctgcggcgtcgtcaaacagaaaagtagaggcacctgccaattctcttggttctgtgatggaaagaagagtggtggccctagccttcgacaggcagcagacgttcgagcatgggagctcgccggtgagattgcactaaaagcactcacaggcaccctgcgcgatatcgtcaacggtgcgactcacttccacaacacgtcaaccaatccaggctgggctcgaaagctcaaccgaacggcacgaatcggaaatcacattttctatcgttgacctgttagtctaatttggtaaccattcttcggagcgaaagatgcactaccacccgcagcctgataccgcagtgttcgtagttggagcccatactctttcgacaacactgcggtggctcggaaaagaggcaaccgttgacatcacaggtgagaaacttcaagacgtgatgcgacgagttgaccgcgcaactttctacaacaacggtgaagagaccgattgttctttctacgccgctctgtagactacgatcatccaaacaggaatttgaccatgtatctgcagttgtcagactttgaccacctccgcgaaaacccgaacgtgcgtttccgcgaagagaacgtcgccggtaaagatgtcgtcatcatctcttacatgctttccagcgacgagctgtggaagctgccgctcggtgtggaatgccgcggcatcaccttcgatgcccaaacgggtaagctgatctcgctgcctttcgagaagttcttcaacgtcaacgagaaagcgcacacccaggctcacatcatccgtgactacaaggtgcaggctgtcctggacaagcgcgacggttcgatgatcacgccgatctgggctgatggtcgtatctatctcaagaccaagaagaccttcacctccgacgtcgcagtggcagctcagcgctccctgtctgtcgagctggaacgcttctgtgaagccatgctcgaactgaacttcactccgatcttcgagttcaccgatcctgactgcaagatcgtcctcgactacggtcatgactctcagcttgtgctgctggctatgcgtgatatgatcgacggttcctatgtctcgtacaaggacctggaccagatctccaaggcttggggtgtgcaactggtcggcggctataacgctgactataccgttgatggctacctcgagctggcaaagattgccgagggcatcgaaggctgggtcatctacaccgatgaaggtcgcttcaaggtcaagacgaagtggtactgtgatcgccatcacctgatcgatattcgtgaacgcgatatcgctgccctggtgctcgaagagaagctggatgacctgatcccgaacctgctcgcaggcgatgcggatatggaagccatccgtgagatcgagcgccgggtgaccgatggtatttcccatatcatggaaaccgttgccttccttggtgtccacgcaagtggtatcgacctgggtaaggatcgtgccgattgggtcaacgccaactgtggcaagctgtcgaagtttgtccatcgtgctgctcgtggtgtggagaactctgacgagtccttcaaggagttctatcgtcagcactatctcagcacattctcactccgttcaatcggcaaccccaatttccgcgacgaggaagaataatgaagtacaccgttaccattctgttcaaaggcaatccgcagcccgtcatcctcaatgaggttgaagagttcactgtgaagtatgaaggtgataccatcaccaacctccaatggaagctggcaccaggacagaatatgctctacattgacctgagtcagatcgcattcgtgttcgcagtcgaggacaagtaagaccaaagttcctgcaaccacttcgtaccaaaacccctgagacccagagcccttgtaccccaaggttctctgggtttcctacgtaagtgtctgattcttggctccaaacagattagcaagtgtctgatctataagattgtcctgtcctacgaaagtctttaatatgtggttgtggggcaaacatacagcccgaaacgaaaagacaaaggaacgcagacatggccaagcacgtagaactgactccgagcaagacctacaagactccggaaaacgctcataaggcggtggagaagttgaacttgccggacttcgtcggtgaccgccagctgcgatacatcatcatgacgcacaccgacggtcgattctatccggtgttcctgggtgaaccggcgatgcaggcaggtgttcacttccacttctgtatcctgggttaaggagaagatcatgagtaagatgcgcatcctgagcggcaagaccttctacatcgaccgataccatgacgagcaggtcgagcgacacatcctggtcagcctcaacgcacgtgagcgcaaggccatcctgaagaacaggaagacccgctacaacttcatccgcaagctgcaggatgccggcatcgtagagcgcagtgggtgccagtgcggtcactgcatgaacggttgggactgctgcggcaggtggttcatgtcccgggcgaagatcattcctgcgccgacgggcgtctacatcgtcaagacttacgagaggaacatctgatgaagaccaagaccaggaacatcctgattggcttcgtagtagcactgaccatcggtgcactgtggatgacgaccccgaccgaatgcacgcacagcggttcggtccccaaatattgcgtggactaagatcatggaacacaacgcctggctgtataccaaagaccgtagcgagctcgaggacttcgccatcggcatgggcattgacccggagcagtactccctcgacgaatccctgattgatgcaatcatccagaagctggaggaacagaaatgagcaggcagtttgtcatcctcaccaagggcggtgagcaggtcgctgagatcgacaccaacaccttcgccaagatcatggctgggaaccgcggcgagatgcagctggttacgacgcccgcaggtcgtggtgtcagcgcctttgtggtcaatcagccgcacagcttccaaattggcggcacggggctgaccactttggacatttcgatcgcgctggatgcgggttatcgcatctaccgttccgaggatatcttctaatgaaggtcgagaacatcctcctgcaggaatacagcggcgaggctgtcaaggacatgccgaagatcctcaaggcacatcacttcatcatggacgcgaaaaacaacatgacggaacgcgccatggtgtatcgtgatgtggctcgccgagctctgggacacgacgtcccgatggacgtttccgatatcgaactgatcggaacctactaccaggagatgtgcaatgtcttcctccgtcaataaggtacgcctgaccaagtggcagcgcggtgaaatgtccttcttggtctccgtgatggaggagggcttcgacgacaacggcgacgtgatggaaggttacatcgcgcagggctacggctttgaccgtgctgaggaactgaccgacctggacaagaagctccgcttcaagcgccaggcaggctccttggaagtcgaactgaacatccgcgaagccaggaccatctggcacgaattcgacaaccgcctcgatatcgagctgagcaactcgtgcagctcgaatgatgaacatggtcgcgcctaccgcaagctcaaggatggtatggcgcgtttggaagcagttttcggcagtgacgtgaggaagaagcaatgaacccggaagatctcaagcgtatgatgttggccagggcaacgaatgcagcacatgcaatgtggggcgcaaagttctgggttgatcttccggaacaggagcgtgagaagcgactgaaaaagatcatggacatcctcggggagttctcctaatgctccgtcgtttcttcaatcgtcagaagcctgtcagcttcgaggcccctccgccgcagggtgatatgtatgagctctggctcaaggtcggcaaggtgcatatcaagtccgcatccttctgtcatcgagttgcggtgcagttgatgaacctgcgcggtgggaagtgggtggcccagcccgactaccacggcgtcttggtaggtgtctacaccttcactcaggacttcatcttcatccgtgtccgcgatgatggatatggcaacgagttgcagcggattgagatcagcatcactgaaggctcctacctccggatcccctgaaaactggcctacacatcgtcttaacgagtggtctatataatgcagatgccggcagaaactttctagtccggcaccaaccaaaaggatcatcgtcatgtctacgctcaactcccccgctcatacctacgccaagccctccggtgctgtcaactctgtccgcaagatgcatgtggagcgcggcggtgaggaagttcgcttcgtcatcggtaaggaccctgcaacaggtcgctactttccggtcttcatcgaccgcatcaagcaggtgagtgatcaggagatcatggccaacccgagcgccaaccaaacgggtcgcgcaaagaagcgagccagcgctcgaaaggctcctgcgaagaaggcagccaagaaggcgaccaagcggacaacgcgcaagaacacgttgcactgaaacgaaagtttctgagagaagctgcccgtaagaaggcagcttttcttttggctgtttttcgtgaccacacaagaaaggaattatctatacaatttgtatatcgacaaacggagcaccaatgtgaagttgttcaagaccgccatcgccaagctcaacgccatcccgagaaagaacatcgaacgtgtcgcggcagttgtcgtgttcactgcggtgaccgtcggtctggcacattccttcatcaatgatggtgggatggaattcttcaagccgaagaccgtcgcggtggctcaggttgatacctacgccaagccgatcgtcgaagagggtttcttcctgaccaagacgacctggcctgattacaaggacacggtgtcggctgagcagtatgcgaaccaatcgcagttcgatcgcacccacctgggtccgtgcagcaaggacaagccgtgcgagaagccgaagagctatctcgactataacctcccggactacctgaccaagtaaggaaacgagcatgaacccgatcgttgaaaacgcatacacctatcgcatccagaacgattctgagactgttgtctggaagtcccaggctcgtgatgaccgaaaggtagaagccatcaagtctttccgtgccgccaccggcgcaggtctcctggaagccaagcaggtagtagagcactacaaatctctctacgatcagaagatgcgcgaggttggttcgaagcctgccaatggcagccgtatcgtcaacctgcgtcctggcactcgtctcgtggtcgccgaagatgtgcctgggttcttcaaggtaaaggagatcaccgagcgcgacctcggcattgtggacgagtatgatctccttcagttcattgccgatacggcagcgcgcctgggcggaccggtggcgtaatgcctttcgtacttcaccaccgccgacaggccagccctctgcctatggtaaaagaatggtctgaggtcgccggctcctattctgaaaccatggaaggtgtcaaggctgagatggaatggtgggaccgttataatgagcaataccgactgacggattgggaattcaaagtggtgcaggtgaaggcgaggaagggatgatggaaaacgatttcggcattgactatcatctcaacatcatgaacaacgggcgcccaactccttcggactatctccctcctcgcccagagaaatgcctctggaggatcaccagctttgatggctactatgccacctaccgcaccgaatgcggacagctggaagatatccgtgccgaggaatgcgttggaatgccgatgatccctgagcctcaaggaaagtactgccatcattgcggtggcaggctgcatgtgaactcgtcgttcaaaaggaagacacactgatgaagttctacatcgtgggtggcgcagtccgagatttcgtgctgggcaagcacccgaaagacatcgactacgttgtggttggtgccacccccgaagacatgctgggaatggggctgaaacaagtcggcgccgacttccctgtcttcatcgacgatgagggtaccgaggtcgctctggctcgtaccgaacgaaagacaggcgtcggctacaacggcttcaccactgaccacagcaagactgtgactttggaagaggatctgtctcgccgtgacctgacgatcaatgccatggcaatggatcgggttaccaatcagatcatcgatcctttcaatggtgagaaggatatcgaggctcgcctgctgcgccatgtctctcctgcctttgcagaagatcctgtgcgtgtgctgcgaatcgctcgtttccgagccaggttcggcggagagtggacaatcgcggatgacaccatgtcgctgatgcaggctatggtacgccgcggcgatatggctcacctgacgaaagaacgtgtgctgttggaaatggacaaggcattcagtgagccttatcctgagctgttcttcaccacgttgcaagagattggcgccttgaaggttgtcttccctgagctggtgctggttgatcacctggactatctggagatcagaaaggcagctggtgcttcgcctgcctacatctatgccgttgtcgccttgtgcatgtctgaaaagaatgcgctgcactttgaagcgcggatgagagtgtgcagtgattggcgccgaatggcacgaatgtatcgcatcatgatgagctgccgtatggacagcaatcaggtcgacattctgtacaagatggacgcctacaggcagcctgagttgtgggaggagttgataaggaacatggccaaggttggaaggactcgtgagagattcttcaacgacctgttcgttgtctggtccgccactcatggcatgggcttcatgaacctgaccgaagaacagcgcaacacgctcaaaggtccggaaattgctgaggctatcaaacagctgcgcaagaaggtgatcaatgaaactcggtgacctgctcaacgacaatcagctattggatctcatacggcacatccgcgccgtgcatgatgaaaccaatggacctaagaataagcttgcgcgagaactaaagcaagtgctgtccgaattcgagttcgaaccgaaggtgatcaatgggtaaggtggtcgtcgatcaaggcgcactccgaatggcactcaatgtgctgattcgggcaggcaaaacggaagtggctgaggagttggaagcctcagccactgactatcctgagcttcctgcggacggatgctatatcgtccgctttgatgatgcctaaaaggcagacgtagacttctgcggatacgacgctcgagatgcagcattgaagtactacgatcacatcgcttggaattggaacgggcatctctatgtcaagatcgattccaacactcgcgatgcggagaagcagttcccgtcactcaaagtggcagacatacatcgcttcggtcgcgccaacccatcacaaggtgaggccagtactttccgctgatctggtcgttcaaccagacacgctcgccgttggcatctttctcttccaagacgttgtattggaattgatacaggacttcgcagaagttcacatcacgcttaagagtatggagggacaagatgtctctcctgattccttttgtgccattctctttcacatagttgttgatgaactctgaggaagagaagtaggtcatccaattggacgctacctttgagcggcgcttctttcctttctgtttgcgcataccgttgaagaacttcttaccaatgtacttcttgccgttcggcattgtgatcaggtagacgaaaccttcgtagccgtcagcgccttcctcaggaaaaggctggccacggaagtaccagggatcacactcaatcactttctttgcacgagccatatcacagtcatctgttaggtaggatgagatatttaacctcggcccctacacagtcctccagatgttaaaaagatgttaagcggaccaccacagtccaatgactctacgggatgcccagcttttaagcgctgatccagtaaccccttgatattactagcattctggtcaggaagggcaggcacgtaagtgtctgattctattgggctccagcactcaggggctgtacagatgacgggtcagcgactggcagcaatgtggttgcgggctccttaacggatcctatacactcagggtgcctgacgtctgagtcaggaaatcgggggacaaaccagtttagattgtgaggagagtgtcatgccgcagccgagatatccgatgatcggggtagtggtagccgtagccactgactgggaattggtgaaggaagtgaacaaggagcttgtcctacatggagtgagtcctgaggcaaggcgagcattttggtttgaggtcctcaaggtagacaacgcgttgaggatgggtgagatagcgcgagagtgggtcacggtacatccaaccatccaataaaaggaaagcccggaccattgagcccgggctttattgcaactatcaaccgccgaggttggtcccggcattctgtgctctctgattgtctgcactcgatccgatctgtacccaacgtcggtattggagtgttgtggtgacagtctgataggtacctgagttaccgtaggcaatgtccatggcgcctacggcaatcggataagcctcctcgagtcgaacaccataggtcggctggtccatctcattcaagttccacatctccacattagctgtgaactcgttgtagaaattgagcgtgttggaacgcacattgatgacggtattctgccataggtcgaagtatctacgggtgtctgcatcagcatcagcgtagaaggagaacgtcacaggatcgtatgcctgagtataaggaacacggaacgatgagctgttctgtgcgcgttcactcgtcaccagattgcgctgcgggaagttagccgtgtggcacttgatgttgatcgaaccgatgccattgaaacgtgcttcctccaactgaaggcgtccgcggcgtactcgtgcatcaatgaaatcagcactgccacccacaccctcaggcagcacaaatcggataaggtacttgtttggtctcatcactccacgttggaagtgagagaggaacttcatataaagggtctcgttactcatgccagtcctgtcttacgccatacctggcgggctgtttgtttctcaaattgctgtagcggaagcatcgctacctcttcccagtactcgtccgatacctgtaccaaacgtgatgtgacgtgtgatgcaagataacgatgaacacatggtgcgaagtattttgacttcacgacgttcttaaggagcttataggacacagccatataagccttgtcggttccggcacgcttacgatactcgatgagcttatccatcagcttcgcacgcatcacgggtggtaggtaatgcaggttgagcccaagccatccgtcggaatacatctcgacaggaatcacacagggaacagtatcataccagggcagtacgtctttgtacttcggatcataggtatagataaacatgccaccaatgaaggtagatgaattgcgcttggcaccaaaggcctcttcaggaactttcgcacgcttgagcttggacttagccatggtatagaaccattcgattgccttcgccgtacgcttacgatcatgaaggatcagcttttgctcgatggtctttttaggctgggcgcccgttctatttgcagtcttctttacagtagccatatgttacttccttttggcaatgcctaaatcgtattcggtcatcaccttgaattccatgccatgcttctctgcataggccctcgcggcagtccacttatcctgatttacttgataggtaacgcactcctcaagataacgctcaggcttcttccttccctttgtaggagcgatagtctgggactcaggtttgatctcaatcagcatagtctttaaggaaccatcagacatcttcaattgaatgatatagtcaacgaagtagcgacggttcttacactcagccgaggagtaatagggaataacgatctcctcactgttccactttactacggaaggattgaggtcacaccatctgttgaagcgaagttcccaggaagaacgatacaccacgtcattagcattgcctacgtacttttcaggatgaagtaggcgatagcgaccctgttgatacttgcgtgccattgttaaatcactcgtttaggtagctgcatagggattcagctataagttgataatctcggttgaaaacaggctaagaattgtgtgaaagaaacaccatagccgaaggcacctgccttttcacctggattaaatatctgtagacttctatatttaggcatacgattgtggcacgccaacgatcaaacaaaacgctatacagttacccacctgacctctcggacgagtcagtacacccagctgcgatcgagttcaagttctttgagagaagctcccctagggaaagcagtcctttgaatacggttcatctgtatatgcccgaatcggttgcccagccatctacggttgactggggcgactcaaacctcgggttcatcggaaacgctattagatcagctgccaacggtgctatggcaggactctcgggcggtctcaacgtaggtaaggctatcggggacgctgtaggtatggcaggtgatggtatgcagctgtcaggcgcctatggacttgcaaacctcggaagtgctgccgctggtctaatgggcggtaacgttactgcggaaggactaatgggcgctgtggctggtatgatccctaacccgtatgtgactgcgctgttcaaaggcgtgggactgcgtgagtttgcattcgtctttaagttctatccattccgagaagaggactgccaggagatctacgacatcatctctgtcttccgtgagaacgccttgccttcatatagtaaggactctatggggacaggcaataacaaagcactgctcaacttcccatctgagtgtgacatccgttacctatggcagggaaaggacaacgagtggattcaaaagttcaagcgttccgtctgtacgtctatcgacattgactatactggccagggtatgttctctactatgagaaacggattcccttcggagatcacaatgtcaaccaagtggaaggaactcgagattgtgacacgcgaagacatcgtggagggttactgatatgccatcgttcttcaagaagtttcctgtactcagctatacactggatgggtacaacaaggacgctatgaacatcgtcactgcggcggtgttgaagcgtatcaacgtggacaagtcctatgtctatcagtcctatgatgtgcctaatggtgcgagtgctgagtcgttggcatatgacctctacaaggaccctactctgtgttgggtgttcttccttgtcaatggtatggtgaatccgttgctcgattggcctatggatgataccgtactcgaggagttcgttgttgctaagtatggtagcctctactccgttgtctacttcacggacttggatggctatcgacttgacgatgtggctgaggcagctgtgcgtgcctatgtagatgctggtaaccctatgcctgcgaacgttcatcctgtgacagcattggaagccgaatccgtgttgaaccgtaagcgtggaaagatcgtcattgtggctccgcgctatatcaaccaatttgtagacttgttcaataagagcattgaaggaaaagtatgaccactgctacgactagtgccaactatggtgacctcaagaagtttgtcgtcaccattggcgacgttgatgtctctgctgctgtgatcagtgcacatgtctttcaggagatcttctctcctacgactactgccattgtgaacttccttgatacatcgaatctgttgatgactctccctatccgttctggtactcgtatcaaagtagagatcgagactgatatggcttctattggtgatggtgagcagtcgtgggagttcgtcatctacaagatcgccgataaggtggctagttcccagggtgtgttggagtactctgtctatgcagccgacgaggccttcctactcaatcagacaaagcgtatcaagagatcctatgcaggtaagaaggtctcggacattgctacatccgttgttcgagaagcctttggtaagaaggttgacgttgattccaccgacaatacgatgcagatgatcgtgcctgggtggactccgttccatactatgtcttggttgttacagactgccacaaaggatggcgctgccgactatgccttctatcagcaggctaacggcgacttcgcgttcaagtcgttcgaaggactctattccgatcctgacgagtactcgggtatcacgttccaggtgcgcccagctaatctaaaggacaacaagggtgattcactctacgactatgccactaccattggtgtctattggtttgaccacttcgacggactgagtaacatcgcatcaggttactactcctcaaagactgcgtcctatgacttcaagaccaaggcatgggaaacaaagacgttcaagtttggtgatgacaacgcgcaggacaagaagtacctgaaggtagactcggagtatctcatggatgccgaggatgcgaacatttcgttcattcctaagcatagtggcatgttcaagaatgcagcgtattcggatactgccgatgcctggattgcctcccgtaagtcttcgttgatgaagttcgagcaagagaagttgatcatccagttcccaggaacggcgggtgcagctagatggttcgcgaagtccgttgatgtggacctgcctgctcaggactctatgtccgatgaagagttcgatactcaacgtcgtggtcgctatgtcatcactcacatggctcacatgatcaacaaagacacctacaagatcaatgctgagctggtcaagaagagactcgaggaagcataacagctgactgagcacgcgcaccgctgctctgtttactcggtcaagacctacatacaccaatgcgatgacttgctcaggtaagccatcattctatcaataagagaattctatgtcgcaggtacacaatttttcgttcggtggcggtgccttcgagtggttcatcggagttgtcgaggatagaaatgatccagagaagctgggtcgtctccgtgttcgtgcattcggctactatgatgacgaagccattccgacttccgacctaccatgggctgtgcctatgcagcctatcacttcttccgctaagggtggtgtaggttcttctcctacgggtattcaagaaggctcccatgtggttgggttctttgccgacggaaagaatgctcagactcctatcatcatgggtacactcgcaggtgctccaggagggaagcctgatacgaacaatcttgctcgtggtgaagaccttggacagaccgtcatcgctgagaaggtgaaagccgtcaagatgtccttggcgaatagcaatgcgcttagtggtctgtctgctgccaccaacatggcgaacaagatcaactcaactgtcaaggatgctaagtctaagttgaatagtgttcgtgatcagttctcgaacatcgcaggtctgtcgaatcttcctttcatggctgggttgaacaatatctcatctaccatgacacagatcgccacacttccatctgaggctaaggcactgcaagcccaggttgaaggagaggtactcgcgatcaagggacaaatcgagaacctgaagaacctcgaccctgaggcactggcaagacagttggtacagaatcaggtgggtgatgtggaagccgcagtgagggcaatcaagtcactcgacttcgactctgtgatgggttctatccagagcattccaatggcgatcggacagatcggtcgtctccaggatgccatcaccaatgcaggaaacatcggaaagattgtaaccacgattcaagggctgtcgagatctattccgaatctcgcatccatccgagcactgggtacgacgatctcatcaatgaacggatggttggagcctactactatggctgcaccactctatccattgaacaagatcatggagaccgaaggaggtcacctacaggagttcgacgacacacctggtaaggaacgattccatcagtaccacccaacaggcacgttcaaggaagtacacccagatggatccaatgtcgataaggtggtcaaggacaactaccgtgtcgtgatgggtgatgactacctacacgtagaaggaaaagttcaagtcaacatcgtcggtgatgcgacagtcgtagtcaatggtgattgcacgacccaggtatctggtaacaagacagatatcgtgaacggaaattattcgttggctgccggaggtaatgtgtctatcgcatcaggtggagcaatgaccatcggtgcagctactcagatggctattcgtgcaatgatgatcaatctcaattgatcaaggcatgccttaaaccctgggttgagctggttcttgacccaggcacctttctttctaacttttctttctgataaatcaaattatacagaacggtccaatacggtgtccacaggactaaggacttgtacctttgataaatatcgtgacctaacagagacccatacaatgtccgactttcagcaattcctacaagaagcatccctcaaagagtgtgacgagctcaatgaaagcctaatccgttccgcaggtgcgtccttatacggcaaggcaaagactactcctgatcacgtcgcatcccaggaaaagggacatgtgaacattcacacctataagaccatccgtcgatcgggtagtgataaggaaaagacctatcacgtcgtgagtcatggcccttaccgtaacagtggtacccataagatcggttctcagcatacccatggatctggcggacaggcatctaagttggtcggcgtctccgaatacaagaacggaaagaagacgaagactcacggtgaagaccactctgccaactcccactccattcacgtgttcaagtaagtcgtaaatagaatagagacaacccaaggaacttttcataatgccaagctcgacctctacaaattaccagttcaacaagttcatggaatacttcctgaagggaactgcgtacactccgcctacttcggtttggcttgccctgttcacgactgtgcctagccttgctggtacgggtggtgtcgaggtaagcacatcaggtaccgcatacggacgtaagcagattctgtccacaggtacttcatggaacggtccatctggtaccaaccaggaatggtccaatgcagccgacgtcacctataacgtgccaacaggaaactggggtaccgtcacgggtgcaggactgtacgacgctgaaactggcggtaacctactctacatcgcaacactggcaactgccaagacggttaacaacggtgacggtgcgccacgcgtactcgcaggacagttgaagatcagtcgcgctacttgctgattgttggaaacacgaaaaagcccaggttcatcgcctgggctttttcacggctagtgatcttaggtcgttgcgatcagcctgacaaactcttcgggactgaccatgttttccttgacaccgtagtacgccgtatgccccacgacgccatccaggaaacagatctgggtgtaatgcgcccactgggtcgatttgttgcctttgacgagacggtggttgccgtcgtcatcgaactcgtggcgcatctgttcttcttcgagagcgatccaggttccttcatccagcggaccgacgacagcttcgacttccttcagccacagtccccaggctgcttcgtattcgccctgcatttcagcgttgtcccacctccgcgtttccgcgttgtagtacttggccttgatgtcgtgtgccttctcgtagttggcagacttgttccgcagggcggtgtattcgctgtggtgaatgctgttcatggtctttgtgctcacttgatgatgggttgggcttgcttcgactggtcgtactccggttcatccgggaacctgccgaagcgatcggggatcagcgcctggacaaagcctaccggcatgtcactatagaaaataccgacagcggtagcgtattcttcgagcgccttcctggtgtccgcttccacaacacggatggcgtgttcggtaccatcacggaacaccaacagtccctcgttgtcgcccatgacgaacttctccttcttctgccagccgctgatcaggtcactgatcaacttctctgcaatcatgggatgaatgttcccgaccatgatcacttcgggccagccacgttccgtcaaaccgacggtgtacacaaacccgggttccttgtctgccggatcaaacacaccgaccatggtgtaaccgttgagttcgattttgatggccagttcgatggcgagcatttcgttcatcagttcttctccagttgagagctgttcacttcgatcaacacgcgcgtctttcccagacgcaccgcatgcagtactccgtcctttgtgtagaacggcatgacgatgggaccctgaggacgcataccgccaccgatggtccacacccattccttgaagtccggtttcgccatccgttcctcaatccacttgcgttggaactcggtgagattgtaggacttgatgttcttctcgaatcgttccttagtgatcatggctcagcattcctcgagcttgatcttggaacccataaactcttcccacgccggaatgtccttcttctttccgtagaacgcgagactgacatacagccgtccctgcatgccttgttccgtgtaggtgaccttgttggccagcttcttcggaagacccaggtcgatcagtccctgtcggaactcacgcaggaacttctcgtcggtgtagatgaagccgtcgttgcgaacctgccacgtcttggcgtcgaaacgcgcgtcgatgtagagcgtcgcgtcatcctcaccatcgtagcagtatgcctgggcgatcttgatcgcattgataaggacttccttctttgcggttgaccaatgaccgcgaccactggtgtttgcgaacagttcaactttcatgagcatgtcctcagatgttttcgatcatgtgagcgcgatagcagcgtgccttactgcaatgcggctggcggaacatcaacttgttcttgtgggtcttagaacagtaggggcaagtgtcggtgagttcaactgcccagaccgctttgtaggtcgccgtctgttccgccgaagccttctggcggtcgacaaagaacgcaccgaaagcgcacactccctgtttcacctgataggagcgaccctgtgcaccgactgcatcaccaacttcgcctttcaggaacttctcgaagtctgcctgggtgtattcggcgatcttcggatactgctccttcatcatcttctggacttcggtgtctttgaagatcttgttgagctgctttgcgagttcagtggtcttcatttttggttgccctactgtttgtccgtgccacaattatatagaactttcgtgtcctgggacaatcttatagatcagacacttacgtatctgtgtgaattttagccgtgaaagagcccggatttctccgggccccttgtattacttggtctctgccaggacttcggtacgtcccagatgcacagcccgcagcccatcctcggtcatgtaggccaggaccagcttgccctcgacacgcttgggcttggagcgggtatggagccagtacttgaagtccgactcttcctgcttccgctccatccattcacgctggaagggagtcgggttgtagagcgccagcttgtcgctggagtcggacacggtctgggtttccatttcgtcacacatgatctactcctctgttatttcagcctccgattgaggcaatcaaactgtaacggagttctttctgcaggacaaccactttgtgaaggttgcggattccgctgatctgtgtttggaaattacgaccactccggtcccgtttcatcgacccccagagccacgggtcctctctaccaactccttgactagcggcttgacggtgtagtaatagagcataggtctctgttccatctcagctgcattgaggcgcctttcctctgcgactgcttcttcctttgtctcgaatggtccctgtacggagacgatgttacaacccactcgatagtgttcaacgattacgtatgccattgtcttagtcccatagtccgctgtgtgattcgtctttgaaccatttgtctgctcgctctttttccgcatcggtcatgagtgggtatgcgatacgaacatatgaacgcctttccgtcacgaggttctgtcttgcccgaatgctgctactccagttccaaaggattggctggagcagattgtcgatgtggctttctcttgtgatcattctgtctctacccaaaagtcaggaaagaaaatccaaccatttgtcgtaacccaatgcccatactccgcatcccacgagcagaccttgaagcttttcttgcgtgttgagacgtctatgtgaccatacatcgtgatcagtgttccgtctttcggcgcgcctttgacttcttttatatccataattcgctccttatgccacggcaatagccaggtttccctggctaccaccaacccctactacgaggtttttacttgccggtcagcttgtcgatgacctgcttgccgacgtccgactgtgccagaccttcgagcatgccggcgatcttcgtaccgcccttcggaccgaacatgtccaggacgttggtcacgccttcgttcgggttacctgcattgctgatgaccttgatctcagcaccctgcagagccttcgcaccctcgacaccgatcttctcgctggcctcgacctgacggagatcaatcaggtacttctggtaaccctggttctcaccgatttccttagccagagtgatctgtgcctgcaccggtgccagctgcatcgccttctcagcttctgcctttgccgtaccctcagcctggataccttccgcgttcagcttctgagcagccaggttaccttctgcgaccagtgtcgtgcgctgcttctgtgcttctgcgttgatcacttcctgctggcgctcaccttctgcctgcacgatcgcgacgtccttgacctcgttcgccttgaccacagcaaccttacgctgaatctccgaagaacgagttgcctcgacttccttgacttccatctgacgaacagtcgtttcacgctgagccgtcagcacttcctgctgcgaactttccttcgcgataccgaccgccttttccttctcagccgttcgctgaccgatagcctgttgggcttcctgatcacgcagctggactgtctgggctgctgcaatttccgcagtctttgcctgctgggtgttctcagcaactgcgacacggctgtcacgttcaattgccgaagtgcgcttggccatgatgttggcgatcacactcgaacccttggcatctcggatgtccatcagctcgatgttcttcaccggctcgacaccccagtttttcagctgctcgccgacttccttagtgaactggtcaccgaaggtagcgcggtccaccatgatcgtgtcgatttcatgcgaggccagaatggttcgcaccgcaccctgtacaaccgaagtcagctgttccttcagttcatcgaagctcgacactcgctgtgccgcaacgttcgagtctgcaattcggaagaagctcgtcacgtcaacaacgaacggaacacgttccttgtcgtacgcctcgtatgcgctcaggctcaggtcgaagaccgacacaggcaggatgatgcgcgtcagacccagcagaggaatccaggaaggccagttgtagtaagtgttgccaccatcctggtccttaccgtacgaggtctgcgacttcgaacgctggagcgtgtgtacttcattcgccggaacgacgacacgcaggttcagcacccagaagatagctgcaactgccacgagtgccgcaatgcctgcaccaatgagaataaacatcagatcagatttccttctttatcaatgaattggttggttacgttttcaataacgccaggtacgtaaaagacctgtacatcgtcgcacactcggaagaagttcttgaagtcccaatacccttcgtccgggctagcgagcaattcctgcataagagagctgaagaagtctacaaactgttctgccgcttccaggttcgcgtacttctcatcttccttacgtggatcattataacggagcgccaactgttcgtcatacagttcgatctgctctactgtcggcagcgcgtcttcggtaccccaaagtttcgcagcgacctccggatacttttcagcagcatacagccacaggttgaacagttcaaccgtttcgttttcagcgttaccggttaccttgtacggcaggtcggtatcgcgcttcttgtagcgagactcgaacgccttcgcgagcagcacatagaactgtgcttcatctttcgtcaggccagaaagaatttccgtcttgtagttgtcggcgtcgttttcccacgacagtacgtgtacctgatagccgggcttgatgttcttgctcatttcagtccttgatagtaggtcttgagttcttcgaggaactgctgtttcctcaacagagcctcagcggtgttggcgatcatgcttccgacgaattccttcggaggaatcacatcgagttcgacggcgtagctgtactcgcagtggattgcccaggtctccctgctatggagaatttcgtaccaggcgtcttcgatgtctccgttgaagtcaccttcgaaatacttccacttttcgtaaccgtgaccgccacgaccactgatccagtatcggttgaacttcatggcgcagccttctcgtagaagcgaagattgttgtactcatcgtcgcttatacgaacgaccttcgatgccttggcttccgcttcggcgaggttcatgatacggcgcagctcagcgcgatcatcatcgtaacgcgacaggtgcatacgccaagtaccgaagccccaaccatgcgggtcagtccaggtctttctctcttcgatccattcgtcaaacggcaggatcgtttcgacttcccagacacccagcttggtcagccaacgattgttgcgtcgcttgttctcatcgacgtgccactgataacggtcacctttgtaggtgtcaacccatgcttcatgagcacgagcattgacaccttcacgcgcccgctttgcgatatcgaagatgaagtcggcatcgaattcacgagtagccattagtagcctcgctcgttgtatcgctgagtacgctcttccttggtcagcacacggacaaagtccacacgctcggagtagtacccgttggaggaaccgcgccaggtgatgtgaacgaattcgcgctcagttcggattcggtagaaggtccaggtgaccgaatcgtactgacgagtttcatcactgttggattccacagtcgcagaacggatcggcgaaccaaccagagcgtgaacgtcgccatcaatggcgtcgatgtagacattctcgcagcagttctgctgatggaacatcacgaagtgctttccacaggtggtgtggaagtcgatctggtcgttggtcttctctacgcgctcgagagtcagaccaatcaagtcgtcgagcggaacatgctcaaatgaatcgtatcgcattgtatttccttaccaatcgtagttgaggcccttggtcgggttcttaagaatgctctcacgccattcgtggaagctctcttcagtgtactcttccttgcaaccgaaaatggactcatagagatcgatccactcgacagcttgataacgctcgtagccgaggtcatgcaagcgctcttcacgggcgccatcttcgatctttacgagcatgtgcagttcgccacagccgtagtcttcgaattcgaagatgatgtcttccttgcagaggcgcttgtaggcagcccaacggtctttgaaaggaatagccttgttgctcagttctttgatgacagactttgcagcgtcatcagcaacttgccgaagagaaatcacggcgtcaattgcttctttgttaagagcggtcattacgtgtcctgaaggctttggcagcttgctcgagagcagccgtacggaagagggtctgtgcgatgttgagtgactcaatgccaggaatcaggttgagcatggacgcacactcgcgaaccacgcccttcgatttcaggatgccggtttcagacatcctggtcagctcatgagcaccctcagccagatttgcttcggcaaatttctttgccgattccatgatccggataatctcgctcactggcagacgatcgtgttgccgttggagtccttcatcagcaccgcgccttcgggagacacgacatacttctgaccgtcgatacagcgagcctcatacgagacctcagctgccgggcgagagatgttcgacccaccactagcccaggtcttgaatgccggaatggcaatcgcagccaggatggcaatgatcgcaacaacgatcatcatttcaatcagcgtgaagccttttgcgttcgaattcttcatagcgttcaatgtaagcctcataatgttgaccgtgttgggtcttgaatttggaatcgagatggtctgcttgcttgaagtgacgattggctttcgcctcgtcgtcacgatcgttccacgcgttcatcaagctggcgaacacagcacttctcactgcctgcgccaactgatatgttgcgaagttcattttgctacctggatgcagtacgccttactttggattgtatagtaatagcccgcttctaactttcgtacttcctgtgaaagatagttcgcctgttggagacaaagttctttcgtctccaccggaatggtggtctgcgaaaccgaaggtacacagcctgtacctccgcacgttggtttgctgatcatcaccagaacgagcgcccactttgccaggatcattcgccgtactccaggcgaatctgacgcgccagcttggtcaggaattcgtgctcaccgccgtagtcctggaaagaaagacgacggtcttcaccgttgtgaatgcggaaagaactgccgtgacccttggtctggacttcggcaccggtcagtgtgaacggaatgtagtagcggtcgtacgccttgtcgtactctaccttgggcagcggtggaaagatctcgtcgagaatagctttcgcttcttcagaaaaatcgcactggtctttgccttgggcttcgagcagagcgtcggcgaggtactcaatcttttcttggcgtgttctgttcatgttcacaatgctacagttcgcctacgaaagaacaaccgtggtaaatattcgtgtacctccaaggactttgtaatggcaggctttaaacagacaattatttcgcacgcgccgaagatgtttcttacattcgacggtgatgcctacgatccgaacagccgactgctcacggctagccctcaggtcttcattgacgagtcgggcttcaactccaacatcatgctacacaatgagtcagaagtctacccagcctatcgcatgggtatcccttctctgattgacattgagcagacagatcaacgtagcacatcattcggttggtatggctatcagccgctcgcgcctacccgttggccaaagtctttcgtagaagtgcagcaccagtctcatcttgctctcaccgcagagcgaggttcctacactgttggcttctttgtcaacaaggcagagaaggaagacaagtggcgcgaccaagaacgcatccttgggttcaaccactacacacagacactcaacaagcgcttcatccgcaaggctgggtcgtttgacgtctacttccgtgactattgggcagctgccgaagagattcgtttcggttaccccggtggcggtgagattgtctgggttgtgcctgattggttctacggcaagaagaacttcgttgtctgtacttggaagatcacggagatcaatcctgacgtctacctcaacgaggcctatctgtacgtcaacggccatctgtatggcagctattcgacaactacggctggcactttcccatcaagcacaacaaccactccaatcgagatcgctggcgtaatcaactcttcatcatactttgaagaccgtcagacaagcgacctgcaactcgatcagatgttcatcctcaacaaagcgttgacccaggacgaaatctgtcgcttgtatagaaagtctaagtcgtacgacaacatcgcagtgcaggctcaggcatcagcatactggccaatgacagatgtggaagacccagcagtattcacgattaaggatttggcaggctacaatgacggtgtgtatcttggtggtgtgacacgcgtagcacgacagcagactgctccgagtcctatcctaggtggctcatctgtctacttccacaatggtggtatgggtgcagcacacagactgacgaacattacaacctatacgccagtgttcaacttcaatggcgattggacgattgatctttggatgcagttctcaaacacggatcgttcggtactcttctcctgtcagaaggacgactatccgcatggtggtgtgctgattgaagttaaccgccgtaacaacaccaacgtgccaggtcatatccagctctcagtgagtcaggagttctacgtttcttctcttctcaatcgagacaatggtcagcctttcaacttcaatgatggtaggttccaccacgtcgcagcagtccgaaaggggagcactgttactctctggattgacggcatcaagcacggttcggtgagtgcgcctgttcagagtctttccaacccaggtcccggtcaggtgtacttcatgggcgccgctccaggcagtctaaataccactggctacatgtctgcggttggtgtctatccttacgctctggatgatgctgagattagactgcgcaatctgtactcgttgatctatcgtatccaaggcaatgtcacactgcaaggtaacccctatcgtgctactgtgcgtgctttcagtcataggacaggcgcgttgattcgtgagatcgagtcctcgacatcttcaggtgactactcaatgacattgtatgacaactctttgattgacctgatggtcatgaacaagcaagaccctaatattcgctatcgagtctatggaccgattgcaccagctctttatgaggatgttccataatggcagttacccagtatctctacaccgacaccgacgctccagttctctacgggcagcctggggctttcatcacagtgctgaaagctgttcttgtgaacggttatggcaccaagcccggtatgggttggacgctagagtacgagtcaggaacgatcgcagtattccgtaactcgaccgctgcgggctcgacaggcatgtacctgcgagtagatgactctaactggcagtatgcgattgtcaaggcctacaagacaatgtcggacatttcgactggaactgatgctattcctggcgtcctgccttcttacagcaattcaaatatcttctggcctaagtcagcaaacaataacaacaacgctatcatgtggaacttcatcggtgacgagagaacgttctacctgaatatttgcccttggtcaagtcagaacgctaatcagtttgcgaactatgcgtatatctacgctgcgggcgattacgactcctacgttcctagctttgttcataactatttcgtagcaggaaattacgacggtggctattcatcgaatggtccttgtatgatcgacgatcagagttcctacgtatgctgtgctattggacgtgcgcaggacaatgtcgctgacaaatactccaaggcatgggtaagctacatggcaggtggtgtaccttccggatcatacaatcatcaagcgttctcagtctacacaggacagagaatcttctatcctgcatatgtgatggaaaatgctgttcagaccaatatcacaggtaagtggcgtggtttgtacggaatggtaggtcgctcaaacttcacatggaatgagaactacggcaagctcccaaacaacccgaccggtcctgatttgattcagttcacagtttccaataacagcagtcagggcgtctacatcttgaacggaggctggtaatgacaattttgattgagcctgcagtattcaagaaggaaggaacatacacttggagcgataggcgcaatcactaccttgtcatggatggcgagtttaaaaagagaccaaatgatatcggcggtctcggatacatcgcgggtatgctacctggaatcgtgacagtagacggcgcgcctgcatctagaacaattgaacttcgattccgagatggtcgtaaggaaatctttgcaagcacggtttcaaatcctgtaaacggaacctacctcattgacgacctcaacccaaagctcattgttgatctcattgcaagagagaaggaagacggagtctataacgatatcatcgtttccaagattcgtccatggacagactatcaaatgtacatccatggacctgatttccctaacgttcgaatcaagccaattttcaagcgtgtgtttgagctcaccggcggagtgatgccttatcaactcagctcagatatcactattcctgaaggaacagaagtaacgcttgatggaaggttcttgacggttaatgttactgcacctatggaaacagatctgtatatcaaggttcaggacacttcagggctttcggttgaaaagagcatcactgtcagttcctctaattcgattgtatccaagttcacaggaaattggatcctcgaaaacgaccctgtaacggacgaaccaagactgaggtcaaatcagattccgcattctggttctacctcttcgacttgggcagccgacaagaattacacacagatgtcgttccgtatgttctcatcttccgaaacaggatacgatattttctacctatatgtcaacgattcggaacgtgctcgtgttagcggtccaaatagttcctacaactacagcacgcctatcaatgctggcgatgtgattagagtcacctatgcaaaggatggtagtgcaatcagtggtaccgatgaagcatgggtgtatatcgacggcgtctaaataagacgaactcaagagaaacaacaaatggcaaactcactatacgctaaagcacgtcaacgattcctcgaaggcgcaatcaattggaacacagacacgattcgtgctcttctcgttgactcaggtaactacactgtcaacctggctacgcacgagtttgtcacctcgattccttcaggtgcacgagttgcagggccaatcaccctgacagctaagactacgactgatggtgcagccgacgcggctgacgctgtcttccctacggtctctggtgcaagtatcgaggcagtcgttctctacaaagacacaggtaccgaagctacatctcctttgatcgcttacattgacattgcatccggtcttccagtaacgccaaacagcggcgatatcaacgttgtttgggacaatggtacaaacaagatcttccgcctatgaatcatctcttcgcataccaaccatacggaccataccctttccgcggtaaggtaatgatgttgcgtcagaaccttgagcctgtgattgacccaacaatcacagtgaattggaacggatatactcaggattaccgctgtcagatgaagattgcgcctgaccagaccaagggttcttatttccattctgcaagtggttcggctgtccatagatatttcacagtcactccctcaggtctaacgctggtaaatgcaacagctgcatttgcaggcgatgttaatgactcttttgtcagcaatgattactatggttgggtagggacatcttcatcgtatatcaatgccttccgttggtcagaccacagccttatcacattgacaaagactggtctaggtacggtgtatggatgcacaatcaatccggtgaatggataccagcttgttgtcacacatagtgccacacctttcattcgttcttatgatctaagagacggttcgtatgtggatggaggggtggtgggtgctaactatcaatcttgtacctggacacctgacggtcagacggttgttgttctttcagcgtcgtctccatacgtctccaagtatagcgcgaacctagcaacaagaacaagtatttccacaaactcatcgtatggtaactcaacaagctatatgtcaggttatagctcttcatacggtcagttccgaggaattccgcattggtctaaatcaggttccgtcatcatggctccgggctccacgtccacaccattcctgtttgaggttgacactgttacaaacacagtgattccgattgctacaaatgatagcgcatatttgtatggtgctgcgtacgatcctaagaacaataaaatctacacctaccaaagccctaacggtctaacgaatagcccattcaggcgttacaacggaacaacgtatgccgaagagcctatgtcctcagcgtcatatatgatgaccggcggaaactcctcaggttgttcaactgctctgatggtagtgagttctaacactggtacgatcacaggaacagttcgagatgtcaacaacaacccggctgctcgtaagattcgcgcataccgccgttctgacggaatgcttgttgctgagacaacctcagacggaacgaccggcaactacacgatcatcactccgacttcggacactgaggcatacgacgtccagttcgttaccaacactggcgagctcttgaacgatctgttctacgcacgcaccacacctgcagcggtagcataatgccaagaaactttgtaactgtgaacggcactgtcaacattgatggtgctgctcgtaaaaaggatatcacgctgttctcttacgggaatggcgccaatcccatttacatgactaaaggtacgagcagcgcagtagacggcacgtactctatcatcggactcaaggagcgcggacagcatatccttggcttggcatcatctgattatggtcctacatggctacccggaacagcttatacggttggtcaaacggtactccctaagaccgctaacaaccactggtatacttgcacaaccgcaggtacctctgatacgattgagcctaactgggttgttggtggagacttcacaattgagtgctggttgaacagagcttcaaacaacaacatgtctgtcatctcaaagctaggccctaactacgatggatttgcttgcatcacacgcggtggtgcagtcggtttcatggtcaatgggtttgagtacaactctgctcctaatgcaactgcaagcagcacgtggtatcatgttgcctgggttatgactggaggcacaatgcgaatctatgtggatggtgccattgttgtagagcgtgctgggctgtcgattcttcctaatacctatgatgtggtcatcggggcagacaacggaacaggtgttcttgctaacttcttcaatggattcattgatagtgtccgaatcactaagggtgttgctaggtactctggtaattcattcaatgtaccaacaaaggacttcccttccttcggaccagttgatcctctgtctcctgagactaagagcctgatgcggtttgacggtgttgaaggttcaaccacctttgaagatgagaaaggctttacctggtcagctcaatccactgttgctctacagacaaaccaatacaagtttggtgggtcgtcggcatacttcaatagctcatatgcgccatggatgaaggttgattacaatgctgattttaacctcaatggtgactggacgattgagacattcttccgtcttgatggaaacacttccaatgtcacacctcacatctttgaggtaagcaatggccctggccaacgtttgaacgtctatcgagacaaccaaggcaacctgtcgttctatacagagtacaccaatggtgcttctggcgtccgtttgacctatccaatttctcctgacacatggtaccatgttgcacttgttagaagttcttcaggtgttaagatgttcgtcaacggcaacttggttggtacctacacaggtgccgttattcctgctgcctcaactgcacagatctacctcggaaactactcgttctctccaaacaccaacgacggtttgaatggttggatcgatgaattccgtttcactcgtgcagtcagatacacatcttcgttcactgttccgaccactgcatacccccgagcaggtggcgacccgtcctataacaacgtatcgtctctgatcaaattcaacgattcaatcgttgatgaaaagggtccggtttggacattcacaggtgacggcggcccgagacaatgggcgtacaagttcccacctgggtctctctaccttgttggtagtggttcgatgtctacaccaaattcagatagcctcaatctagtttccaagactagtttccctgatggcactgcaaagtggattgacagcggcgcaacggagtcacctattgcaagaggaccgttccagattcctgatcctgttgcagacacgagcacaatcttcctatctcgcaatcacgaactgcctccacaggaagagatgacagcagcaaaagctgtggtatatggtgggtgcacctcggttagcagcaagtttgccggatacaacgcgatcaagtttgatggatccacagcaggtctctattatcctgctgtggctcctggttcaggtgattggactgtcgaaggatggttctttatggatgccttgtctccatcatcttcgcaatgtgttctttacatcggagatattggtagcaacaaccatcgccttcagatgggtcctactgctgcgaatggaatcgaaggttacgtaagtgcaggtctcaatggtggtacatcttcattcgccgcatcgaatcctgtatcaggtggatctcttattcaatcaaacacttggtatcacattgcttttgaaaagtttggaaacaatacatacctgtatctgaatggaacacaggttgccacagctacccttgtagccaactactggatggttcctgcttcaaatgccaacacctatatcggtaccggtcgagttgcaagtgtaacaagattcatcaatggcagaatcggcgaagttagagtgagcaacattgcgcgctaccaaggcgtcgcaagcttccaaattccaacggcgccttacacggtttgaaacacggttaaatatctcagtctatagggctgatatcttatctgtgttgaacgcgctatctgaaaatctaaacgacgccgcaggtagcttcgatgccacttgatttcattgcgtctaatctaacccataccaaaccagtaggaactctggactttgtaagcccggaaggaatgctatttggtattgagattggtgatggtggcgagttcaagattgccggcgcacttacaggacaattcctccaagcttcttggggcggtaagcctgtctatggtcatcctgctcatgttgttgaaacaacctggggcgacaagacatacatcggtgcaggtattgcgcgtcgtggtcatgtcaacattccgaccattgttcagcaacagatcatcaagcctgccggttttgatcagtcagaattcggtgtagttcagaccaacccaacttccaagtatgttcgccctacaggtggacagatcgatacaacttggttcggtgcaagaggatactctgctcctgtaactgctgttggtgcgtcttggtctgaccagattgtaatttctcctcttgcgattgagtcgacgctcaccttcggtgatgcaaagatcgtccctgaacagaacattgaaccttccggttgggtgtcaactcaattcggtaacagctatgtcttgcattggtacgagtacgctccgccaatgtggactcttgatggttcatgggctggtaaggacgaatactttgacgctaaggatggtgtaatccatgccttgtggcgcccgcctgcagattcacagacaatcgctcctattgcattcgttgatagtgcaatgggtagtccgcgcgtacgtcaagctgtaaagcctgagggtattgcgtctactgtcaacttcggtattgcgcagctattcccttcgatctgtaataactggtcgtaccagggtgcaaccaaccgcattccgatcacgtttgacaatgttgctgaggcatacccaggcaaccgcatcccgattgagttccgttgcggatcgtcaggaattcgctactccgacttcgaaggctttatcgaagcgcgtgatggtgccgaactccaggtcaagatgtatgacggctatctgtcgctcaacatcggtgaaggtgctactctaagcccaattgatctgacgacacgagtcagcatcccgctcaacttctatgacggcgcaagttggatcggtggccgtggatgcgttgatgtatctggtctagtcaacattggctcgagcggtaacgctacaccaagcccaacactcaactctgttcgccttcagaacagtggtgatccgaccattggctcttcggttggtactcctctccttgacgtatctggtcaagacacattcgagtactcatggacacagaccctcaacggtccatggtacgacaacgactttacagatgcgttccttgagttcggtgtattcttcaaccgtcctcatagcaccatcacaacggcaaccggttactgggaatacggcactccgttcaactccaataattcaccttggctgagcttcagaatccctcgcgatcctgaaagtaaaacagtcccggtctatgcgcgcgttggcaatgagacaatcaccctccagccatttgagaagccagctggcctcgatctttttgctggtggtaaccgtcttcgtgttcgtttcctacgcaacggtctaacgcttactcttgagatctactacggcgacactctgctgtctaggcagaacccgcctgtatcctggccaacaagcgttgtccctgtttggtactaccgtaactacaacaacccatcctcgtacattgaccttgcaaacatgctgggctgtacggatggtctgctgacaacttacccagctaccaacttcaacttcggtgcaaacttctacgatggtcaatcggttgcgcttgatctgtccacgtcgacgatcctgccaatcaatagcttcgccgaagatgcttatctggctgcggtacttgatacacgtcctgtcgtaacattcccgatcaacgtctatgaaggcgcctcggtcgacctagcactcaacaccacgtctacgctacagcctgtagcatatgatggcggtgtgttcgactttgatatcaagatcaatccatctgcagacctcctgtttgcaatggcagatggtgcttcagcttcgattggtctgtcaactgcattgcagcttggcacagtcagcatgttcgaaggcgcggcagtttcagcgtcgcttgatacactcgaaaactactacatctacgatggcgcgttcgtcgaagtcggattctcgactgaaaccacgatgccaatggatggttacgccggtgagacggtacaggctacacttgatgttcgtccatcacaaggtatcggcactctcggtatctatgaaggtgcgaacgttgtcacgtcgttcactacgctgcctcaggtactgctgtatccaaatgagatcaaggatggacactcgttcaactatgacatcctcggcttcatggggattgacctcaacaatactgcttgctgcccaatcaaggacaatccagcacgtattgaactgactgctggacctgcaccagatgagcgttacgacggcgacaagactgtcttcactgctgaactgtccacactaccacgtttcagcctgaatgtctacagcggtgagcgttttgactctgttgatcctgagtacctgacgttcaacttctatgaaggctcaggtgcaatcgttgatcgtgtcgagtacagccgttacaacttcaacctgtgtgagggtaacttccttccagatggcgatcatgtcaacgtcgagcttatcgcaaccgattcgctctgtaatgactcgactctcatcttcgatggtggattcgttgatctcgacattcagaacaacgtgcagtttgctgtacctctgcctacaggtgaatacctagatgcagtggtcacaatcgacaacgcctggatcatcaacttcctccacggcgaatatgtacgtgtatcgaatcccgaattcccgctcaacttctacggtggcgaaatgtcatccgctaagtttgaagaggaagacatctacggcttctccggcgagtatgtttcggtcaacctgtccactgactacgacgttgagttccttgaagtaggctgccttgacaacgagtttgttcctgcaaacgagaacggcgaccctgattgggataagttcaatcctgttccagttgagctcgacttcttcagccactcaatcaaggctcgatgcttctaagatttctttagtaagtaaccagtaatcaaagaaaactttacaaatggctacatgtcttgaatcaattgctgcgatgggagggattggatctctgcaggagatcttccctaacactgtcatgcctttcagcgtgacatcgacggctaacaagctgtttaggctccgatcgcctcagttccagtctgttcaatttgcattcaaccttgcaggtaactcctggaacacacagatgacagtgttcagttggaacggtacaacggcgaccgcaattggttcggcgtctatcacatcagcttttgtcagcgttaccattgacttccctgtaggtgattacatcatctgccttcgaccaggaactgcaacacctcagtcgggaaccttcactgcttcattcacaggctactcgcagacagcaaatctcgtggtagatatgtttggtggcgaagagtactcatgcatcgtttctgatcctccaagaccgccacgcgagtgtaatgaggctttgttctttgaggttctcgaaggagaactcccacctggcttgcagatggattttcaaggaacaatcactggccttttgccaaacctcgattgccttgaggacacacctgcccctgctgtgaactggtactttaccgacaacgacggtacgtcatggccttggggtcgtcagtggagattcaaagtcaaggtatgggtcaatggtctgaaagacacagccttcgatgaagattggttctgtgtcaagatccacaacaactggacattcgaccttgacaacttcatggaacagagtccattccaaagagtggattatgtccgtgtcgtagagccaccgaagccactcgaggttgagtgcgcaccttgtgctcagatggaggaagtacagttcatccctcagccaattgacgctgtctgtgagccttgccaaaactctacggttgccaatcaggttgagttgattgcgatcccggttgagcttgcaggtatcgatccgaacgatgtcgtcacctggtatgacttgaacaaggacactgtcttcaccaacccataccttgagaagttccgtgatgatttgagagactcacaagttttcaagatcatcacaaactatcgagagaccaatccttacgagagcctcgagtacgctgtagcatccaactatcaaaactatctccagcttgctgagattcgtcttgatcctacaacggatccaaacaacctatctgttttgatggctcaatggcgtgactacatgaatcaatcgctgccaaccacaccaattggatacggaggagagactttcagtgtcaaccttgcctgatcaatgcgaaccgtgtcctgtaatcgagccgtttgtgcctgttgccaaactgccggacgtgctttgcccttgccctgaagaagtcgaaaagccttctattcttccaaccatcacgacacaggaagtgatcacctattgcttgaaggacgcactttacgcaatggcaacacaattattctgtgatctaaacaacggtccaaagggctgtaggtaaatattcaagatatgggactaccaacttgccgaatgacagatatgaccatgggtcacggatgctatcctccccagaaggtcttacaaggttcaccaacggttttcatcgaaggtttgccggctcacagagttggtgacgcgatccagccacattgctgtgatcactgtcaccctagctttgcggcaatgggttcctccacagtctttgtcaatggacaaccactcatgcgaatcggtgattctgcaaactgtggttccaaattgatgacaggcgcaatgacagtattggcaggctaatggctgagaacaaaatcttttccgacctagacttgaacatgatcccgaatcctcatacgggtgacctcatgcctaaggtgaatcaagaagctatcaaacgctctgtaaggcatgccttcaagttgaacgcgtatgatatcccattcaacaactcaatcaagtctagcctgaagcactatctgttcgagcagaacacccagctcacacgcgctgcgcttgagactgatctccgatggctaatgaccaaagtcgaaccgcgcatcgaagttcagacgattgatatcgttgcgcctaagaacaaagatggctttgacattaccatcacctacaagatcaagtcgatcaataccatcgactcgtttaacctgattgtcgagaaaatccgatgaaaaacttgcctgtccagtcgcttcaatttgaagacatcaagactaacttcaaggaattcttgaagggaaacgatcgatactctgacttcaactttgaagcctcaggtatcagcacgctgctcaacgtcgcgtcttaccaaactcactacattggcttcttcgtcaagatgctccttgatgaagcgttcattgactcggctcacacccgtcaggcaatgcttagccatgctaagaagtcctcatacgttccaaagggtaagcaatccgcgaaggctgaggttgttctcacgctaaccgttggaacaaacaatgagcctctgagccgtaactatccgattgaacgtggcgctactttcaaggccacaaacgatacacaggaccagcgcatcttcacggtgcttgatggttctactatctacaatcgctcggttaccggttcgactgctacctatacctcgacacctctgcgcatttatgaaggtcaattccgttcctggaacttcgtagttgacacaagcgttcagaaccagcgtttcatcctaaaggacgagatggctgacgtcgatactttccgtgtgcgcgtgaaggagaatgcatcgtcgacagtgtttgaagagtacaccattgcatctgacgtgcttgatcttgatccgacatccaaggtgttctttgtctctacagacgagaacggttattatcagatcttcttcggtaacggcgtctttggtgttcagcctgaaaacggcaacgcagttgagctgagctacatcagcacaaacggcgagactggtaacggtgctaaggcattcacctaccagaacgatattcagaatgttgtctcgacggtaacgaccaattcggtttcggctggtggtatggaaccacagacgattgaggaacttcgattcgctattccgaacgccaacaagcgtcagaatcgaatcgtcatctcgtctgactatcgtagcatcctccttgacaagttccgcaacgtcgattcgctcaacgtttggggaggtgaagagaatgtgatccgcgactacggtaaagtctatatgtccatcaagcctaaaaactcggacaagctgactgctcttagccgcacgcaaattcgtcaggatatcgtcaagaagtatggcgtggtcggtatggacgttgtgttcgttgatcccgatttcatcaacgttgacctgtcaatcactgctaagcttgatctccgtaagacgactcgctcgcagcctgaactattcaaccttatcctcgaacgtgtcaaggagtacaacgagacctacctgtccaagtttgatagcatcctttccgacgtcgatctcctgtcttacatccgacagggtgagcctgccattgtttcgatttactcttcaaagattctgtctaaggatcatcagcaccttcacaactccactgcctcgaacaatgtagtgtttggtaaccgactggtcaagggaacaatcgaatcaggtgtgatcacctatggcactgagactgtcaagttgattgatgacggtgcaggtgttcttaagttggttcgagtctctgatagctcagtgattgtagctaaatcaggatcggttgactacaccggaggagtcgtaacctatgcactgcctcaggctgctaaggttgctggctatgagacaagtacatcaggtgttcttgagttccgtgcagtcccttcggttccagacatcaacaccaacatgaacaacatcgttcgtatcgaaaccactaaggtagccgctggatgagcacactaatcccagtactcgcgcataagcttccagagtttgtgcgtgaagactatcctaatttcgtacaatatgtgcgagactatctggcctggatggaacaggacgacaacttcttgggcatcattaatgcctggaaggaaaacatggagccttcgcttcaagtcgagccttacattgatgcaatgctcactgacctcgggttcgtctcaggtcagaacctcgctgtagacaagaacctgttgatccatctgttgcaggacttctatctcagccgtggtactgaggcatcgttccgatttcttttccgaatgctgttcaatgccgacgttgagattcgctaccctcgagagcagatgctcgttccgtcattcgctgagtatggtgagcgtcatttcatcttcacctcagcgaacaacatcaacatgcttgacttccaagacctcgtactctatgtgcgtgagaatggtggtacgttgacaggactgacgactaaggtaaaggcttcgattgagaacattcagatcgtccatggctcaggaacaccatatttccgaattgagatcctccgcccgacatttgaatttcttgtcggtgaagctgtcacaatcatctcgggcgactacgctatcacggagtttgtgaagcctgttctcgcaattgaaatgaacactcctgggtctggctacaaagcaggtgaagtgattcagatcactggcgccaaactcaatggtaacgcattcatcgagagtactcgcaagggcggtgtcagtaatatccagatcgtatcatcaggtgccaactactctgtaggcgatctaattgttgctcgttctgatgatgacggtttcggtttctctgcttcggtcacacaagtcgatgctcaaggtggcatcacagggtataaggtaatcaatgaaggctacaactacgcaacacttcctaatctttatgctcagagtactgtcccagcgagccttaaggcgtcaggtggtaacgtgggtgcgatccaaactgtcaaaatggaaaacccatttgtagactttgacgccaccgatatctctatcgtaagcgctgaaggaactggtggtacattgacagctaaggctgtcagccgttgggagactcgcgaatggactgaccgaaaaggcttccttgcagagagctcaaccctgattgactctgaccgtgtgcagcagttctcatacacaatcgttagcccaatctcatcaagcctttacgacagctttgttgcagactatctacatccagtcggatttgttcgttcaagttcctacgagattgtttctaaccttggcttaaatatcacaagtggaacgcctgcaattggtactgagaccccaatcgtgtatccggcagttctaaatctcacgtttgtgtctgagtacgattcgttcgagaccatcacactcgtaacagacaccggtgacgagttcggcaccaacctatttgaaccaatcctaattgattgaggatctaagaaatggcttacagcttcacgccttctatcaaaccatatgtgatctccagcttgtacgaggccatgaagtctgctcgcccttcggctagaactccttcgacttcctactcgcttggtgcacaggtttccaacggaaataaccgctacatctgcatgcaggaaggtgttacaggtgcaggtaacggtccttccaacaccactggtgcggtctatgacggcacggttcgttggctcgcccttggtgcagacaatgtccaggatggtgacgtcatctccaacctctaccttggcgtgggcaagcagacagaatgggctaacccttctacacctgacgcaccagacacatctttgactggacagaatgaggcacttgatgacctcactgctcttatcaagattgattcttccaacctgcgacttggtctgaagaacaacacctggaccactggcacaatctactcgcagtatgatccggatgtggttacctatgctactccgaattatgctatcgttggcggcacctatgtctacaagtgcctcgataacaacaatggtatcgcatctactgacgcaccatctggcacaagcacttctctgatcgagactgcggatggctatatttggaagtatgtcggttcggtatcaggccctgagatgttcacttttggtacgaccgaattcgttcctgctcctaccgaagtcaatgttacaacagtgcagggtgagatctcgtcgttcactgatatggtatccacttcaactccgtttgctgctgctgatacgattcgcgtcgtagtacagggtaacggtacaggtgcatcaggagctgcacgttcaacaacttcgggtgcatcaaagtctttgactggtctgtatgcaaccgcaggtggttctaactacaccgaagcctatgcgatcgcatataaggatggtactccaggaacaggcgcaactctggctgcgacaattgatgcaggcaagattgatactctgaccgttagctccccaggttcggcttacacttctgcatcagtggttatcatcggtgacggcactggcgctgaagcaactgtcgttgtttcctcaggcattatcacagcagtcaacatcactgaggaaggtagcggttacacctgggcaaaggcattcatcatcccaggtacggctggcggtgttgctaaggcaaacctgtctcctccgggcggtcatggttctaatctcgacactgagctgggcatcgcgtctgttctggtttcggcacgtctttcggcgagcctgtctggatatattccaaccgagcctaccgatactgacggttcgttccgtcaggtgactctggtttcaggtgtccgtggtacaactaagaacgcactcgcctacatcggtccatcgcatccggattttgtttctggatcacaggctaaatatctcaagggcagcgggtttgttctttacatgaacaacatcgtagctatcgaacacacttcctcgcaggaagaagtgatcaagatctcaatttcgctttaaggtaaccaatggctaagcttgacctaaatcgtgctccgtatttcgacgacttcgagccgaagaaaaactttatgaaggtcctgtatcagcctgggcgtcctgttcaggctcgagaactgaatcaggtacagagcatcttccaacaccagattgaatccttcgcgaaccatatcttcaagaatggttccaaggtaagcaatgcgcgtacctccttgcagtcgaaggcttatgtccgactgaccggaacgcctgttgtttctacctatcctgagaatactcgcctgcttggtgagacctcaggcatcaccgctactctcgttcgcggtgttgacgttgaaggcgacgatccggcaactctctatgttgtctacacaggcacagcaattgacggtgagacctcggtattcatcccaggtgagaacatccgtatccttgacgtgaacagcgttgaagtcggaactgttactgtccgctgcccatcatgcccaggttccggtctgagcgatactctacctccaacaggctggggtcagttcttcaccgttgacgaaggcatcttctatttcgagggaatgttcctagatacgactcgccaagacatcatcgtggtcaagtacctcgagaagaatgtgagtggcgagatcgtcaacttctctccatgcaagatcggtctcgactttgttcagagcgtgatcacctatcaggacgacagttctcttctggatccgtcgctgggttatccaaatagcactgctccgggcgctgatcgttaccaggctaagctcgtactgaccaagcgcagctataactttgaggatggtgaaaacttcatcccactgtgccgccttggtccaggcatggtcattgagttcatgaagactgactctgagtatgctgacctgatggataccatcgcgaagcgtacctatgagactaatggtgactacaccatccgtccgttcaaggtctcgttcttcaatgctaagaagacctcggctgctgatcctctgggttggtctgtcgatggcgatgaagactcgctggtctcggttgttactccttcggttgcatacgtaaagggttaccgtgtcgagtctatctccgacacccctgtcgtattcaataaggcacgagacaccaacaagctgtcttcctttgtcaagcacttcgatggtcgcagctacatcctcggtgtgcctaagggtgcaggtatctgggcaaacgcaaacaccggtggaatgatcaccgatgcaactgtcacgatctatgatcaggctaccacaggaaatgctgctgcaggttctccgattggtaccctgaagatcagcgacgctgcctatgtctcaggaaacctcgctacaaagaacgctacctaccgttactatgtctatgacattgcaatgaacgcaggcaagaagctgtccgacgctcgctcctttgtggttgcaagctctggcttctacaccaacgcggtcattgactcggttacagagtcggttgagatctacaatgcgaaccagactgcgctgatctacaaggttgatcgtgctaacgtcaagtctctccgttccgcagaagacccactcaacggcgcaatgaacgtcgtggttcgtcgaaagctcaacggtgttgctgacggatcgggttcggtcaccttcacaacttccgctaacgaatacttcgacaacgctggttcgtcgatgcttggttggtatgttgctggtggtgtgacgacttccttcatcccaggtccgctaaccgcgttcagcccaactagcattaccgtagcgctcggttcaggcgccgccggtgcatcggtatatgtgatcatcgacgtgttgaaaacaaaccagacagagcgcacgaaaacgcctcagaatctgactgttacaaccaacactgctcctgacactgctatcggtgcagaaattgttcttggtgtgactgacgcatatcgtctgaagagtgtcaagctgtttgttgaaggttcgcctgatacaccggtggcagacatcactgacgaatacaagatcaactctaacatcactgacaccgcatatcgcgagtccaagattgttcgtaccaaggctccaagcttctcgacgaacaactcataccgccttgcgatcaacttcgattatttcgagcacagcggctcacagggcttcttcactgttgactcctatgcaccggcacttaacgctgacgactcaggagtgacctatgagactcttggtggatacactgcttcgagtggtgttgtttatcctctgtctgcttccatcgacttccgtccagacatcctgggaacaaacccagtaacatctgttctgccagctaatgaaagcaccgcaatcttcgacattgagtattacctcgcacgtactgacctccttcagatcaacaaggatggtttcatctacgtaaagaagggcgagccttcggatgatccacgtcctccgaagactgacgacaacgcgatggcactctatgagatctggctttcgccttacacctactcgttgaacgacgttcgtaccaagttcatcgagaaccgtcgctacacaatgcgtgacattggctcgctcgagaagcgaatcgagaacgttgagtactacaccactctgactctccttgagaagtcggcacaggacatgtccatcaaggacgctaatggacttgaccgattcaagaatggtctgattgcagacaacttctctgacttccaggcagccgatctgaccaacgtagagttcaaggcagcagctgaccgaaccaaggctcagctgcgaccaagcttcaagttgatgaaccgtaagctcgtgttcaatgcagctaagtcctcaggattccagctgtcaggcaacatggcacacctaccgttcactgagagcgttgcaattgagcagccttatgctaccaagcacctcagcgtcaacccatacctgcagtataaccaggctggccagatggtaatgtcgccaaacaacgacacatggtccgacacaacgatgcttccacagctcatcactaatgtcgacgccaacgttgaagcgatcaagaccattgttgaacagactcctgatcctgcaccaaaccctgttgttgaagagaaggttctggcggttgactggggtacgcacgtcgacctcaatactactgtcctaaataaggtagagactaaaccagtaactggcggtggtggacgtggcggatcgccgtggcgcaacctcaatgtcttcacccgagctaactaattaaggctagaaatggcaactgtagaatcaagaactgatacatacgatctgggcgatatggttaaggacgtccagatcgtcccttacatccgtagtcgtagcgtcgagttttacgctaccaagatgaaggcgaacactcgcgtctatgcgttctttgacggtcaagccgtttcggagttctgccgagatattggtttccagcttagcgcgtctaatgctggaactgcctcgcagcttgttgagtttggctcgccactgattacagacgcaaatggtgagctccgcggtgagttcaagattccgggcggacgtttcttcactggagagaaggagtttgtcctttcggatgacccaggactcactggcgatgcagacatgcagactacgagcgctaaggctgcttactttgctggtggcgttaatgtcacgaagcagaacgtcacacttaacgtagtttcaactgtcgtcatccctgatgcggtcaacccagcacgtgctgcacctgaacctgctccagcacctcctgctccagatccttcttgcttgaaggagatgaagaagtatcacccaaagaacttcaatgagatctgccaatgcgttgcaggtggtggaacctatggtgcctgcggtgaccctatcgcacaggcattcattgtcaacaacgatatgttcatcagctcgcttgatctgttcttcaagcaggttgacgtcttcagtgaccgtatctttgtccagattcgcgatatggtgaacggttacccaggtactaacatcatcgctcagaagtactacagcccggatcagattcagcctttcgcgtctgatgattcgagcaaggcattcaaggttgttttcgatcagcctgtgttcctcgagtcgatgacgcagtactgcttcgtcgttggtggctattcgcctaacactcgcctctgggtctcgcgccttggtgaggaagtgacgaacatgccaggaaagattgttgagcagcagacgaccactgaggtcagcttccgttcgctcaatggtacgacctggaatgcagagcagtatgagcagatcaagtatcgtctctacaaggcaaacttcactcctggaaccatgagcctcgtattcgagaacgctcatgaagatgaggaagtgatccttcctgaaaacccattccagactcagacaggtcagtcacgtgtgcgtgtgttccttcgtgatcatggactcaccacaggtgatcgtgtctcgatgagcctgaccagtgatacaccgttcacgattacgatctcggacttcgttccgcaggtcggtcagacgatgcacaccacaacaggcaagggtgtcatctcagacatcaagtcgacagctacagctaatcagtacgaagtgacactgaaggatatctccggtgtgttcactgcaggtcagacatactcgtgtgatgcaaagactcgcgaggttcgtgactggtatctcattagctccatcgacaccaagaagccagcgagctacacactcaaccagtgcttcggtaccgttgtgacaaactcgtatggcgcaaagtatccaggtggaacgattgcaggtattcctgtctccgagttcaacactgagcacgtcactggttcgctgggtcactcggttgttgaagtttgctcggttgactcgttcatcatcaacctgacaacaccagctacgatgactggtcgctttggcggaagcggaatcgtttgctataacggtggtggtaagtttgacgtgttcaacgtttctggtgcttacctgccttaccgttcctctgagaactggacgcttacaggcgttggtcatggcgacaccggaagcctgttcgaggcagctaactatcagactcaggcaccaatcgtgtttgctccacaggaagacaagttccttggtcagccgcttaagattgcttcagcaaacaacgagcagatcatgcttggtacaggaaaccgttcggtgactgtcacggcgtcgttcaactcgactgatgctaccagcactccaatggttaacatggacaccttctcggcgatcatgatttccaaccgttccgagtggcaggacaagtcgaagatgacttcgattccatacgacgctacccagcctgtatggcacgctgaggaagagattgtcaatggttccgagatctacaagtatgtgacacgtactgtcaaccttgaaaatgctgcaaacgacctctacctgtacgttgatgcctacaaggacctcaacgcagacttcgatgtctacttcaaggttcttccggtctacgcttcgggttcgattgaggcacgtccttggatcaaggcaaacgcactgaccaagtctcgttcttcagttgacacctcggatatggtcgagtataaggttgtcgcttctgagcactgcaccgcatacacctcggaaggagtcaactatgcaggttggtcagaagacccattcactgcattcaagatcaagcttgttggtcgttcgaagaactcctctaagccaatcctctttgagtcactaagagcaatcgctatcacataatggacgcaaaagtaagagactatccagaccttatcaagcgcggaggcggcgtggttaacaccaatcacgacgagtacctccgcgctaaggctcgtttgaaacaagcaaagcgcatcgacaatctagagagcgaggtaagggggcttcactcaaaactagacatcctgattggactactccagcatgatcaatctaaatgacatctcccttcgtctaatgtcgtatcaggcaactgtgcgacagacgattaccgccgttcagcaacagcagtgcagttctgacttcattgaccgtgtcagcattgccctaaataatatcgaaaatccgtctaggaacgaaacatggcaaaactcaactcgcgagaagagttcaccaactactgtctgagagctctcggtgcgcctgtaatgcgcatcaatgtagacgaccagcaggttgatgaccgaatcgaagacgccctagacctattctgggaatatcactctgatggttcggaactcgtattcctgaaggtacaggttactgagacgatgaagcagcagggttacctccagcttcctcctgagactcagtctgttctgcgcgtcatcaatgcaggctcgggtatggatggaggcggaaacggaatcgcaactatcaacctgcagtatcagcagtacatcaccgatatcatgaaccctcgccgcatcatgcaaggtgatggtctttcagcttactacatcactcaatcttacctcaacactttgaacgacacgttctctgctgaggacagaatccaattcaaccagcactacgataagctctatattcttggtgactgggatgctttgactgttggatcttggatgggcattgagtgctaccgccgtgtcatgcctgaggtttcgggcgatgtatggaacaaccgctggctcaagaagtatgctactgcacagatcaagaagcagtggggaacgaaccttgtgaagttttccaatgtccagctacctggtggtgttcaattgaatgctcaggaaatcatggatgaagcgaaggaagagattcagacgctgaagcaagaacttcacgacatgtatgaagagccaccgaatttcttcgtaggttaaatatctcgaacattaatcatttcgagaacctatcatggccttgaaccgctacttcaacactgcgaacgagaattccgaacaggaactctttgaggatctggtcatcgagatgatccagatgaacgggcaggacgttctctatattcctagagaaatctttgaggttgatcctgtccttcaggagccgaagaagactgtcttccgtcgcaacttcatcattgaggcttaccaaccggatggttacggctatccgggtgagcagaacatcatgtctaagtttggcttccgagtcaatcagactgctgacttcattatgtccaagaagcgtttcgctgagcttggaactggacgagagcgtccgatggaaggtgacctcatttatgtcggcaatccctacgatccagatttctctctgaccaacactctgtttgagatcaatcaggtatggtacaaccagcctgactggcagtttggtcgccacttcacttacaagctggtatgtgagacctggactggttctcgtgagaagttccagaccggtaagactgcacttgatacaatggagacagtgtctgatgacagcgaggagccagcacgtgtcaatgaaggcatcatctctgcgaagaccggaatcatcgttgaccagtttgatcgccacaatccattcggtgacttctaatgtcaagacctcacttctattggcagacaactaaaaagctgatcgtggcatttgctacgatctttgatgagatcgaggtcaccgatgactttggtcgaccttacaaggtacctttgattttctcccagaaagagaagttcattgaagccatctactccagtaagagtatgggcgagaccgacattgatatcacattccctcgaatgggtttcgagttggcgggtatgaactacgctcctgagcgtaacctcaacccactgaaccagattgtcgatcagatggatgacggtgaagaggtgatgacctacaaccgagtcccgtacgatctacagttcgatctctacattggtgctcgtaaactcgaggactctctaaaggtacttgaacagatcattccgttctttactcctgagctgtctgtcaccatccgtgatagagaggacttccagcttgagactgtggttcctgtcacattgaactcgacgtcggtgaatatcgactatgaaggaacctttgatacaaagcgtacgatcatgtggaccctaaacttcaccgtgaagggatactactacccggaccgtcgtgctaccaacatgatcaagcaaacgattcttaactttggtgacaaagattacgaaagaatcttctctaaatacacgagtacagtcacaccaatcgaagctggtcctaatcagattcacacggttgtggacacacatggatcacaattcgaggaataagaaatgacgtttgaagaatttctaggtgaagccatcaaaggatggaagcacgcacataacgaccttgcaaagcatcgtcgcgaacagtctcaggcaggaaatgaatggcatacgcatgcgctgaacaagtctggtaaggaaagcggcatgcacgatgctcgtaagtcgcacgcatcagaatcagctgctcgtgctcaccatgaacagttgaagaagaataacccgaactcgcatatcgcgcacaacttgtaccacaacggtaagcacgtcggaacgatgtaatgcaaaatgcccttgatgcaatctcacaatccctaggtgccgcaactcctgttgcgaccattcctcgcccatctcaagaaattgcgaaggttgatgagttcaaggaagcacctgagattgaagatgattatcaggaggctcgttctaatctgaaggaactaatcactcaggtaatggaatatgtacctgaggtagtagaactgacacgtcagtcacagtcagacaagatgatcaatgcgatggccaatctgctaaacacagcagccaatctcaacatcaacttgtctaagctgtctaaggacatcaagcaagctcctaagggtaagggagtcgttgccggctctccacaggaagaagttgctcaggtatctaatactacgaatattttcgttggttctacagaagagttcttggatatgatgatggagaaggataagcgtgctaaggaagctgcaaaggcagcccaagcagcttccgtcatcgaaggcgaatgcacaacagtagagacgtaacattccattggactcagaagagccttcggagcatatcctcacttcgttcggaattcggagactctgacgagtctcctcatagcggtcataatgtctttctgaaccttgaattttaatcacaattcggccaagctggctcaaatgatgattaagagtttaatcacaagactggtctgaccctatacaggacacggggaatcggtggcgccctattagtcaggattggtgcaattaagcaatcccgccagtccatatgccgcacagtctctgagcatatgaacacaccagttgcaaagtaagcagagctggtcaaactttaagccgtaaaggctctttgaattgtctctggtactacactcaacagactctatctcacgtcgcgactacgcttagccgacggctagttctgatctaattttgagaaacaattggtaaatattcttacagacatatggtaaatgatttcctgtggttggacaataagacttggaaacaatatgaaattcgataagacataccatggtgaaatcaatcccatggatcagtacaatggattgaacaaccttaagaaggcaggcgtcaagattcagatgactcctgaacaggctgaagagttctacaagtgctcacaggacttcgagtatttccttgagaactacgttgagattttgagccttgaccaaggcactgttccgttcgtcccgttcggctatcagcgccgtgcaatgaagaagatcgtaggcaaccgattctcaatcctgcgatggccacgacagatgggtaagactacgacagtagcagccgtcctgttgtggtacgccatcttcaacaagaagtacaacatctacgtgctggcacagcagcgtggtcaggctatggaaattcttgatcgtatcaaggaaatgtacgagtgcctgccatggtggttccagcctggtattcacacatggaacaagggttcgatccagctgggcaacaagtccaagatcgtgacagcagctaccggcggttcaggtgttcgtggtaagtcggtcaaccttctgtatcttgacgagttcgcatgggtcgataacgaccatgagttctacacagcaacctaccctgtcgtctcttcaggtgacacgtccaagatcatcatcacgtcaacgcctaacggtatgaacctgttctacaaattgtggacagaggctctgcgcggtgacaacaactatgtctgggacgatgccttgtggcatgagcatcctaagcgagacaaggcttggtatgacgagcagatggctaacatgtctgagcgtcagttcaatcaggaattcatgtgcgagttccaaggttcgtctgatacgctgctctcgccggcaactcttcagagactggtcttccagaatccgattcgtctgcttggtgatcataaggaattcaagatctatgaggatccgattcctggacacttctacgtcatcactgttgacgtctcggaaggtgtaggtaaggactactcagttgtttcggtcatcgacgtcactgaggcgccttataagcaggttgcaatgatgcgatcaaacatcatgtctccattgctgctggctgaccttgttgataagacaggtaagaagtacaacgatggctatgtgatcgttgagtcgaacacctatggtaagcaggttgttgatgccctgtggatggactacgaatatgagaacatgcttctctcccgtggtggcaacaacgatgcaaagatttcgggtgcgcgcaatgagcgtatcgcaccaggcgtcaagactacaaagaagaccaagcagatcggctgctcaacactgaagggtttgattgagtcgagtcagctcatcatcaacgactacgacactatcgaggaactcaactcgttctctaagaagggaacaagctatgaggctgagaagggcaagtacgatgacattgtgatgagccttgttatcttcgcgtggttctctgcacagccttacttcgaggacacgtttgatcagaacacgagagatcttgttcgtcaaaacatcctgcaggacgctgagtatcacactgccttcggattcatggacgacggcactgacgatggtttcgacttcggctttggcaagcagagtgaggaattgttggagactttccactaacctgagaacataaatatctcagacatattgcttacatgaagcacgatttttgatctcaggagaatatagatggcatcatctaatctaagccctggagttggtttcactgaaactgacctcaccaacattgttggttcttctggcacctcgggcggtgcatttgcgggtgactttgcgtggggaccagtcgagcagattgcgacagtgtcttcgccattggaactcgagaagacctatcacaagccagatgacaagaactacacttcttggttctctgcattcaacttcctcgcttatactggcgacctgaagattgttcgtgcggctgacgaagatgcaatcaactcttcggatgacggcaacggcttcctggtaaagaactcgaaccactttgaagttgtcaagactgctcctacaactgtgcagttcgctgcaaagtatccgggtgcactgggtgactcgatcgctgttcacatggctgacgcttcgacgttcgctggttggcagtatgcgtatctcttcgacaccgctccgggctcctcgcagtgggctgaatcccttggtgcagcgaatgacgaacttcacatcgtgatcgttgacaagcagggtaagttctcgggcgtggttggttcggtgcttgagaccttctcttacctgtcgaaggcttcggattccaaggatgcgaacaacggtcctaacttctacatcaacgtcctgaaccgtacttccaagtatgtctgggcactggctctgccaactggcgcagatctgtctgctccttcgaccggtaaggttgcttcggtaactgtcggcgcgggtggtacaggctacactgcggcaccaaccgtaacattctctctgccaccagcaggcggcgttcgtgctaccggtactgcaactgtgacggctggcgctgtaactggcgtgaccatcacaaatgcaggttccggatacgtcacggctcctactatcacattcgcaggagcgggtacaggtgcaacggcaactgcggttgttggcactgtcactgacgctgcagaatggggtactccaggtgtggttgcaggtgaagcacagaccttcaagcgccttgtcgctgtaaaggctgctcctctgaccggtggtaaggattcgactgctatcactgcaggtgacctgactcgcgcttacgatctgttctcgaaccaggaagaagtcgacgtatcgttgatcttcactggcgatgcaggtggtgagactgagcacaacgttactgtccagagtgcaatcgacaacctcgctgaatcccgtcgcgactgcgttgtgttctactcgccgcagctttcggacgttctgaacaagactcagtctgacgcagtgaacgcggttgtatcgactcgtaacctcgttggacgcgcaagctcctacgctgttatggactcaggttggaaactccagtacgacgtttacaacgacaagtaccgttggatcccgctgaacgctgacctcgcaggtctctgcgcccaggttgacagcaccaacgatccatgggtcagcccaggtggttacactcgcggtcgccttaagaacgttgtctcgctggcgttcaacccgaacaagaccagccgtgatgcgatctacaaggtcggtatcaacccagttgtcacgttcaacaccgacggaactgtcctctacggagacaagaccctgcttggtaagaactcggcattcggacagatcggtacccgtcgcctgttcatctccctggagaaggacatctcgactgctgctaagtattacctgttcgaaaccaacaacgacttcacccgcaacaacttcgtgaacatggtttcgccgaagcttgagcaggttcgcggtcgtggtggtattgaggacttccgcgttgtgtgcgatacgtcgaacaacaccgctgaggtcatcatgaaccgtcagttcgtaggctcgatcttcatcaagcctgtctactcgatcaactgggtacagctcaacttcgttgcggtccgtcaggacgtcagcttcgacgaagtggtcggtggtacattctaagaacaactactcgtagtattcttgagccccgggaaaccggggcttttcttttgcctaaatagaacgatgacaattggtaacctggcatgacatttgaagatttcctatacgaagcgtttggtgtgaacgaggtcgtgacctatggcacaaacccgacagctgacaatggcgccttctcaagacatgaaggttctattcacacctacatcctgttccgaggcaagaagtttatgatcttgttcctcacacaggacagctcaatcacattctcattggtcagcgagaagaaccttgattcgacgttgattcctcaaaaggagtctaaggatggtctcgtgttctacaacaagatcttctcggctatgaacgtggtgctcaatgctgcacacgctaagaagtttcagtttgaaggtgaaaccgacgagcttaaagacctctatagcaagttcgtgtccaaccgatcattcctcagaatgctcaaggacaaaggctggcgatatgatggagagaaatacgaaggtttgtatcttttctcgaaggtgtaaatacctacgtatacacattactaggtaattgattatggcaaatcgcagcggacaaaagacttacacttacctgttctattggtccgaacaggacaaagcatactatggttaccgaggcgcaaacaaggtatcacctgagaacgacctatggacagtctacaaaggttcatccaaggtagttgatgcctttgtccttgaatatggtgaacctgatatcgttatgatcgactcaacgtttgatagtgtggtcgaggctaaggaattcgaacgcgaaatgatcgctcaattctctatggacacttctgatcattggctgaatctgtctccttcgcacaagaactttttccatgggaagtctcacactgctgagacacggaagaagatgtctgaaactaggaagggtaaggctccgcctaataaagggatcactggcgtatacaagcagacagctgaaacaattgccaagcgcgttgcagctacaactggattgaagcgaactgaggaacagaaggctaatctaagagcagggcaagccaaatcaaaagataatcctaactattctaaggacagaagcgaccgagctaagaaggcttgggggacaaaacgtgctaacggctatgtaggtcctaacaaaggtagagtgttttctcctgaggcgagagccgcaatgagtgcaggacagaagaagcgacacaaaaactaaatacacatgattctaatagtatggttgagtccataggaatcattctcaactcaatcaaataaggagccatcaagatggcacaagcggacgtatattctttcctgagcaattttcgtggtggcggtgctcgccctaaccgttaccgcgtcaacatttccttcccgctgtctgtaggtcgcgctgttgaagcagcaaccaagatcagcttcacctgccagtcggcttcgattcctgaatccacactgggtgccattgacgtgccttacatgggtcgtcaggtaaagatcccgggtgataaggtttggggtgattggactgttcagatcctcctcgacaacgacttcctcggacgtaccgttttcgagcagtggcaggatcagctgcttggtttccgaaccaacgttgctcagccacagatgctgaatccgatcttctcgtatgcacaggcagacatcatcactctggaccgtgcagaccaggaagtacagcgttaccgcgtttacggtatcttcccaacaatggttggcgaaatccagctcggctacgaccagaacgaccagatcgctctgcagccagtgacgttcgcaatcaatggctgggaatctacagctacccgtttctaagctatgaaacgaaggacagcccagtgaaatatctgggcttttctttggattaaatatcatgtgaaaccatgaaggaactatcatgcagatttttggttacgaattcgggaagaagaaagaacctacacaagagttgaccacgttcaatatcgaccgtgagactacctctgaggtcgtcgttcctgagacctattacaatgaccatgcgggcgtcatgtctgtcccgtatgagttgctccagactcctgcggatgaagctgagcttatccgttcttaccgagaccttgcatctaccgctgaggtcgatgaagccttgcaggaaatccgaaacgaagttttcatcttcgacgttcctggtaagaaggctgttgaactagattttgtcacagagtctaagctatcagctgcgatgcgcaagaagattgctgcagagttcgatgaggtttacaagctcactgactttgatatcaacggcgcgcagtggttcgacgattggtatgtcgactccaagatctacctctacaagatggtagattacaccaagctcaaacagggtatccagaaggttcagttcattgacccactcaagattcgtcttgtccgtgtcatgcccaagcctaatccggatggaaccttcgatgctgctaaggtcaagcagttctatctgtatagcaactttgatcctaagtctcatccgctcaatcaggttattcagctccagcagggtacatcaatccaaggcattcaaattcgtccagagagcatcacctatgtgaactctggtctgtttgatcgcaaccttggtcgctttgtcggttatctgaagaagtcgattgtaccattcaacatgctgaagatgatggaagatgcaatgatcatcttccgtgtcgttcgtgcacctgcacgtcgcgccttctatgttgacgtgtctggtctgcagaagaacaaggctgaggcttacatcaaagacctcatggccaagttcaagaacaagatggtctatgactcgaagacagggcagctgtctgatcgtcgtaacatcatgaccatgttggaagactactggctgcctcgtcgtgaaggcaagtccactgaggttacgaccattgaaggtcagaactctcaggacatcatggatgaaatcgaatacctacgcgacaagttctggcgttcgctaggcgtacctcgcagccgcttcggtgaccagcagactccaaacctgtttggtaagggtaacgagatcactcgtgacgaatatcgcttcacaaagttcctgcacactctgcgctcgcgattcattcctgttctggaagacatcctacgcactaacctgctgctcaagaagatcattactgaggcagactggaacgatatcaagcgcgatatcatctggaactacactgaggacaacaccttcgttgaatcgaaggaaacggaaatcctcaacaaccgtctcaatactttaaatacaatcgatcctcatgtaggcaagtatttctccaagctgtatgttcagaagaacgttcttcgcatgtccgagaaggagatcgcagaagaagataagcagcttgcaaaggaacacgcatcaggcatccacgatgacccagatgcagaagacggcgacaatggcgcgactttcagcggtaacgctccgcctcaaggtcaggatgacggagaggaacaagagtttgcagacatccagccgggcgaaaacccatttccaacagattaaaggagccgattaatggcaattgatatcaacaaattgaacgcctacgacttcatcaaggaaatgaaaagccatatggctaacgtccttgaggagcgtctagagagtggtgaggtttgccctccgctgcctctggaagagcacgtagctaaggatacaaccgacaccgattggactgcaatgggtgaagctgaaaagaacctagtcatctcgctccgtgagaacggtcgccagcgtggttcagacgaaggtgcttatgcatctggtgtcctttggctgacattcaagaacaagaaggcttgcgaagactactgcacctacctcgaaactgccgatggcgttgacacctatgagattgaagctgtacgcgaagatctcgtgaacggttttgtcgaagatcaggaatatgacttcggtgacattatgttcgacaaggactttgagttcaacgtctacgtctatattgatgcagacctagttatgcttccggctgaagatctcgaagttggcgacgagtttgaatgggacgacgattcagacaacggtttcctgtccgaggttcgccgaaagatcaaggtaaacttccgcggtaagaagcgcatcaagatgcagtgcagccctggattcaagtgggatgcggcagctaagacctgtaagaagatctctggtgctcaggtagctgttatgcgaaaggcaatgcgccgcgcagtattgaccaagaagtcgatgggccagtcgttcaaggcacgagtcgttcgcaagacccgcaaggctaaccgcttccgtaaatcatttggactgggacgctgagatgacgtttgacgaatacctagcagagcaaaacttggctgcgatggctaatcatcacttcactaaggctaagcgccacaaagaaggcacgctgcattggcataagcacaatgcgcgtggccacgcactttgctcacaacaccacgataagaacggcgaccacaaaaaggctgccgagcatcacgccaagtgcgaagagcacattgccgctgccgaaaagatcgaagatcagaagcacggctattaagtagaagagagaacaggaaatgcaagtactagtagaacgcattgacgatgttcgtaatgaaatcctcgttgaggaagttggtggcatcaagcacaagaagtacatcatcgaaggtatcagcatccaggctgaggtaaagaaccgtaatggtcgcgtttacccaaaggaactgatcaagcctgagatcgatcgcttcattcgtgaagacattgcacttggacgtgcagtgggtcacctcaatcaccctgcaaacgatccgcgtaacgactataaggaagtgtctcacaagtatgagtcgctgactgaggacggcaacaactggatcggtcgcgcagtcgtaaccacaggcacaccaaatggtcgtatcgttgctggtctgatggatgaaggcgtgaacatgggtacgtcaactcgtgctcttggtaagaccaagatgttcgagcagcgcggtcagaagacagctgtggtgcagagctttaggctcatctccccaggtgacattgtatctgatccgtcggcaccagatgcatacctcaccaacctgatggaaggtaaggagtgggtttgggaaaatggtctcctgatggaacgtgaagtggagattaagaaggagatcaatcatgcagctcgcacaggtacactgaacgaagcgaagatgattgaactgttcaagaagttggttgctctgagcaacggacgcgaagtctgagaatttctcagaactaaataccatagaacttaaaacatcattctgaaagatcttaggagtaagtaatgaatgaacaactaaaggaacttctggagaccctagagctttcagaagaaaccgcaactcagatccagaccatcctgacagaagcatttgcagctgcaaaggaagaaggtaaggctgagggcaagaaggaagctgatgaagctgctgacaaggacaaagaagcccttgaagaagcacatcaggaagaaattgcgttcctcaaggaacaggctaatgcctacggaacccacctgaaggaaaaggctaacgcttatggcgagtcgatccaggagtccgttgttgctaaggctaaggagtatgctgagttcgcagttgatgcattcatcactgagaacaaggaacgcttcgtagaaactgaagagttcgctcgcatgaaatctgcgttcgagttcatcaaggaagcatttgagaagaatgcgttccaagttaaggaagatgctgctgtaattgagctgacagagtccctacaggaatctactgctcagtatgagtcgctcttcgaagacctctctgctgctaaggaagagcttgcacagctgaaccgtactctgattctggagcgcgcaactgctgatctggctgagactcagaaggagaaggtaaatgaattgcttgaggctgtctcgttcgattctttggatgagtacaaggacggcgtagcaatgatcgttgagcaggctaaggctgtggctgccccagcacaggttgcacctctcgccgacaccccggaagtgctcaacgagcaagcgaccccggctaagaaggaagtcaaccaggatgtcaagcgcctgatgggcaagggccttctgtaagttgaattcccagaacataaatatctgagaattgtttaattcgtatttgagatttttaggagaacaaaagatgtctcaagaagaaaataaagtggataccctcctagagaagtgggaaccagttcttgaaagcgaaaaggcagatgcaattactgacccgtatcgcaagaaggtaactgctcagcttctggagaacacacaggaagcactgaacgaagcttcgaacctgaccgccggcgtgcagaactgggaccctgtcctgatctccatggtccgccgtatggctcctaagctgatcgcatatgacatcctcggtgtgcagccaatgaccgctccgtcgggtctgatctttgcactgaaggcacgtcgtgctgctaccccaccgaacactggtcctcaggctggtgcagaaatccttggtctgcaggaagctgatacttcgtactccggtaccggtactcacgctgcaatcactgatgcaaacttcctgactggtttcgcgaccggtactggtaaggtcacatcggctggtgaagtggatccatggaactcggtcggcgtcaccatcgacaaggtcaacatctcggcagttacccgtcagctgcgtgcagactactccattgagcttgctcaggacatgaagcgcgtacacggtctggatgcagatgctgagcttgttcagatcctcagcaacgaactgatctccgaaatcaaccgtcaggttgttcgtacggtctacaacgctgctaaggtcggtgcgcagtttgcttcgtccccaggtaccttcgacctgaatgctgacgctgacggacgttggtctgttgagcgcttcaagggtctgctgttcgcaatcgagcgcgacgctaacgcgatcgcaatcgagtcccgtcgtggtaagggtaacttcctgatcgtctcgtccgacgttgcttcggcactcgcgatggcaggcgttctggactacgctccagcccttcagggtcaggtttcgctcgaagtcgacgcaaccggtgcaacttatgccggtaccgcaggtcgcttcaaggtctacatcgatccgtacctcggtaccgatgcatacctggtcggcttcaagggttcgactcagtacgacgcaggtctgtactacgcgccatacattcctctggaactgcaccgcgctaccgacccaagcaacttccacgctgctctgggcttcaagacccgttatgcaatggcagagaacccattcgtgggcaactcgaccagcatcggttcgaacgcgaactactactaccgcaaggccctcgtcaagaacctcatgtaacagtgaggtccttacaggacacggttgtaaagttttcagacaagacccgctcacaaggcgggttttgttttggttgaatttctaggcatctacaatcgtacatctctatgatgcatctttctggactgttaaaatgctcttgaaccagatgggtagcaaatagaaagaaagttagaaagaaaataaagaaaggagtatagatgccaccgaggtgtcgtgcccgaggctaaaagattcggcatgtagtacatagacacacgtggtaggtgtagcttttaagcaagaaagtgagatcccttgatactactaggtttcagtagatgaaggggtaattttgaaaagccgtagaacccttgatattactaggagttgcgtatgcagttttattcttcaatgaccttggcagactttgtagcagccaattggacactgatggaccctaatgtggttagcctcattgaacgagaagcagatcgtcttgctgagttggaagaagatgtgatctcgtggaaggcaatttcggaagacattgttgatgccaatgaagacaatcgtgattacattctcaatcgaattgaagacatcaagaaaggttcctacactctaaatgagcttgaagagttcgttcgtcacatggatacatcagtatgatcagactcattggactaacaggtaaggcaggaacaggcaaggacacctttgcaggtttcatcaacaaggccatcaattttgaaccgtattcgtttgcaggtccactcaaggatgcttgctgcggactgttcggatggactcgtcatcagattgatcatgacagagagttcaaagaggcaatcgatcctcgctggggtttcagtccgcgtcgcgcaatgcagttgatgggaacagagtatggacgtcagatgcttcgtgatgacatttggattcacatggctaagatcaggcttgatgaaactcgtaaggcaggtctgctcgttgtggacgttcgttttgagaacgaagcatcatggatcagagacaatggtgggttgctcatccacattgaacgtccgggagcaaagtctgtggctgcacacgcttctgaggcaggtgttgcctttgaagatggagacctggttgtcaccaactccggatcattggatgctctccagatcattgcacagaacatcgtgaccaacctgagattgaccgattaaatactggcatgaccagtaaaacaatcaatcgaaatccagcgatcaacaccagctataagctcgagattccgggctttgattcgctgaactactttgtgcagtcaaccgaaatcccgtctctatcttcgggtggtgttgaaaccgcatatcaaaactggggtacgaacgtccccagtaacagaatcgagtttgatcctctgaacgtcaacttcttggtgtcagaggatctaatgaactaccaatcgctctatgagtggatgattcagatcaccatgactgagcctgtagttcctgagatgatgaagaacattgttctgcacatcaccaactcgtctcgtaatcataagatgcagattcgattccataaggcatatccgaccatgttgggttctatcccatttgattcaggtgtcaatgatgtgaatcctctgctctgttccgcaacattccgttatcaatactttgagattattcgcgatgcgtctggacgaacttcaagctgagattgccgttgactctgcaatcaataataatgccctggatacggaatccctgaggattccaatgttgcactcgaagtactacaactacttccttacagagcttcgtattctgaaaggcatcgagattgaatataagcgtgtgaagaaagaacgccaccagtattggctgggacaggcgagtgatgaagtctacaaggctgagcctaaagacatcaaaatcctcaggcaagaccttgaactgtacctcgatgcagatgagaagttgactgagctgaaatcgaaatatgagatgcaaaagatgaagactgagatgctcgaagccttcatcaagacattgaacacaagaaacttcctaatcaagaactcaattgaattcctccggttcaagaacggcggatgacataggcacgaagaatgcaagcagatatcaaacttcactataagaacgaattacacgtcaccctggactgccctgttggcgtctcctatgaagtgtctgaggcgtttgcattcttcgtcaatggttacaagttcatgcctgcgttcaaggcaggtcgttgggatggtaaggttcgcctttacaacatcaaggaccgcaacttctacattggtctgctgccaaagctctttgaatgggctgaggaaaacggctacaccattgaatacgcgaacccgaaagacttcgagcgccagtacccaaccatcaatgaagagtcttggaacgagctgaagaagtgcggcaagtttgagcctaagtggtatcagaaggaagctgtcttcagggcaatcaatgagtctaagactctgatcctgtcgccaacaggctcgggtaaatcttacattcagtatctgatcacgcgttacctgcttgatcacactgatggtaaggtcctgatgacggttccatcgacgtcgcttgttgaacagatgttctctgacttcaaggactatgtagctgacgattgggacgttgaagagaacgttcaccgtatctactctggtaaggagaagtacacagaacaccgagtcgtcatctcgacctggcagtctgcgatcaagctacctaaggcatggttccagtctttctctgcctacatctgtgacgaggcgcatggtgcagatgcgaagagcatctcgcagatcattgaccagcttggtcatgctcagttccgccttggactgacaggtactctggatggtactaagatgcacgagcttgacatgcaggctcgattcggttccattgtgcgcgttgcctctacaaaggacctgcaggatgaaggttctctggctccgttgaacattgagtgcttccagctgcgatacagcaaggatgatatcgctctcgtgaagaacatggactacgatggcgagatcaagttcttggtcagtcatccgaagcgcaactatctgctcgcaaagactgcattgacgcagaagggtaacaccttgatgctgttcaactatgttgcgaagcatggaaaggtgctctacgagttgatgaagccaatgtgcgagaagtacggaaagaatctgtacttcatctcaggctcaactgctgttgatgaccgcgaacagattcgtcagattctggagaaggaaaacaacgccatcctactcgcatcgtatggtacgcttgcggtaggtgtcaacgtcaagaacctgcacaatctgatcttctgtcacccgatcaaagccgtcatccgaacccttcagtcgattggacgaatccttcgaacggcagaagggaaacaagatgtaaaactcattgatatcgcggacgatttatcctatactacacgcagtggggtaaaaaagcagaacacaattctgcgccacttcctagaaaggctcaaaatctacgtaggcgagaaatggaagtacaaaatcataccgatcaagatgggcgagtaagcgaaaactcagctgtagatttggtaaaggtcgaatcgggtaaggcatatccgattcggctaatgcacttcccaaacggtttgaatgtcattggttatgtgattgcagtcttcccagagactacgatggttctgcgaccctatacggtcacagttgattacaatgcacatacagataatgtcgaaggatatgagttcagtcctttcctggatcagatggcatatttcaatccactggatttgacgccggttcccttcatgaacaatcagatgatcgccattgtgcgcccatcagaacatgtggtgagcaattacaccggcgtgatcaggttgagagaaaagattgcatctacccctgacgatgaacactttgagatcctagtatctcgagaggttcctgatagtaagacacttcactaatacggcattttcagcattgaccgaagacaagaagaaagcaaatcactatgtagacaagcaggcgctctacgctgacctgtgtgaatggaagattcggaaagacacggcaatcgctgaaggcaggaaggcaccacccctaccagattcggttggcgatgctatcatgaaggtagctgagggtcaggcatcacgtccaaacttccgtaactatacctatatcgaagagatgaagggcgaaggcatcatcgcagccgttcgcgccatgaactccttcgatccaaagcgcctcggtaagaacggtgaggttaacccgttcggattcatttccctgtgcgtatggcgagcattcttaggctacattgcctacgagaagaagctccaaaagactaagatggatatgatgactgatcccgtcaacgagttcttctcgacgatggatggcgatcacggtcactacatcgacaactacgacgtcgttgaattcatgagccactgaggtaatcatatgaagattgcaatgattaccgatcagcactttggtgttcgcaatggctccaagttcttcttggacaactacgagaagttctacaatgagatcttcttcccgactatcgacgaactaggcatcactcacctctggatgctcggtgacttttgggaataccgcactcgtattgatgtggttactctgtggcgcgctcaagagatcttccttgaccgccttgaggaacgtggcattcaagtaaccatcatctatggtaaccacgacgtcgcctacaagaatcgaaacgacatcaactcgatcgacttcttggcgaagatgtacaagaacatccatgtggtcaagacacacgagacgattgagtttgatgggactcctgtcaacttcctgagctgggtgaacaactccaacctggcagatagtctcgagttcatcaagaactgtccgcctaccatcctgtgtggtcactttgagatcaagtcgtttgaaatgatcaagggtcacgtatgtgaacacggcttcgacaagagcctgtttgatcgctttgatcaggtctattcaggccacttccacacggtctctaccgacggtcgaatcttctacatctcaaatccatctcagaccaattggtccgactacggtctagacaaaggtttccgaatctttgacacgaccactcgagagttggaatttgttccaaatccgtttgatgtctactccaagatcgcctataatgacgacattgatatcgtagagtttgactacgatggatatgccgataagatcgttcgtgtctatgtgcagtcttactcttcaacaaaccagcacaagttgagtctgttcctcgagaagttgaacaaggttgtctatagcgcagacctgatcgagatcgacgagactcaattcaatagcgagactggtgacctgcaattcgtagacaaccatgagctgattgagaaatacatcgaagaggttgttcagagcccaaccattgacaagaacgtcctcaaaggcatgttcaaggaaatgtaccgtgaggcactggatatggcagagacagaatgacaacttatgtagatgaaatgagaacagagcttcttggatatgccgctcttgatcctgaaatccttgcattcatgcgcaagcatttgcctaggatcatcgctgaagaacttgtaggtgtccaaccaatggatgaaggtggcaaggcctttgaggagctctatcagcatcttaaagcgactaacaaagcctttgtcttttcgagcaattttgaatgatctattttcgtaaactgagattcaagaatatcttgtccttcggcgacgttatgaccgaagtacagctggatcgctcaccatcaacaatggtcatcggaaagaatggtgtcggtaagagttcgctcttgctggacaccctcgcctttggtctgtttggtaagcctttccgcaagatcaagaaagagcatctgatcaacactaagaatggtagagatgctctggttgagattgagtttgacaaggatggcaagagctaccttgttcgccgaggcatcaagcctggcatttttgagatcttcgaggacggtaagctcctgaatcaggaagccaacaaccgcgactatcagaagatcttcgagcagcaaatcctctgtatgaactacgacgctgcctgtcagatcattctggtcggtaaggctcagcacacgatgttcatgcagctcaacactggcgaacgtcgcaagtttgttgaggttgtgctgaacctgatcgtgttctcaaacatggcacgtctgcacaatgcaaagacgaccgagcttcgtaaccgcatcggtgaactcaagactgcaatcactgtcgcagcagagaagatcaagatccgtaagaagtatattgatgacctcaagaacgctgataagcaaaatgcagcagcagaacttgaacgtatcaatgctcagattgacgagatcactgctcagttgaccgagctacatgcgcgtaagagcgagattgaaacggtcgaaggtattgacagggatgcctataagaaggcgatgaatcatctgtctgagcactccaagatgatcgtcaagctggacacttctctgtctcagattgagaacagtctgcgccagttgaacaagtctcaggattgccctacctgtcatcgtcctctagaacatgaggatcatgctaagcaagtcgatcaccttacagataagaaagccaagatcgatctggcaaagatggagctgtctgttcgcattcagcaatttgagtcggtcgtggctgaattcgaggttgcggttgctaagtacgacgcctacatcgacaaggttcgctcggttgacatgcagattgcatcggctgaatccaagcgagacttcctggtcgctgagacaaagaaggaacgtcacagtcaggcagacaagatcaaggaagcaaacggcgagttgaaaaagctcgaggacatgcacaccgctctggtagacaagctggaacagctttatactaagagtgattacatgagcctgattggaacgatgctgcaggacaagggcattaagacaatgctgatcaagcgcttcattccgatcatcaaccacgaggtcaacactcacctcaatcacctcggtctgttcgtcaacttccatctggatgaaaactttgacgaaacgatcaaggcacgaggctttgacaccctcgggtacaattcgttctcagaaggtgagaagctgcgcatggatatggcgcttctgatggcatggcgcgatatcgcacgaatgcagggcaacgttgcaacaaacatccttatctttgacgagatctttgacagctcacttgaccaaggcggcgctgacgcattggcagacatgcttgcactggtgaaggacttgaacgtcttcatcgtcacgcacactccagagaagatcattgacaaagtccgttcaaccatgaagatcgagaaagtcgacgggtttagtagaatcgtatgagcacattctttcaacagttcttcgaggacacctgtaaaaacgtccttagcaatcatctcggcgagttgtcggatgaggtaacatatcaagagatccgtattgatctagccgaatatgctagactcacgggagtccaaattgttatgaaggtcgttggaccaaggcacctgaacttctctacatggagtcaggacgttcagtatttctatgactaccaatggtaaaagatcatgagtaagcgtttgacccagtacttctatctgtacgaactcggtgagaacaccatcaccgagcgcatcacattctttgagggcgaacgtcccgaggctcttgccattcccggttggaaggggtggttggacgagttggtccatgcaggtgaagctgcattttgatacatgcctgaggttacatgttgcctcagtcacctacctgttagtataagcacatattgttcacttaggagttgtaaattatgagtttgtcatctgaaactttgaatgttctgaagaactttgcctcgatcaaccagggtctcctgttcaagccaggcaatcgtcttcgtactctgtccgttctgaagaacgtgttcgctgtcgctgaaatcaacgacgagattactcgcgagttcgctatctacgacctcaacgagttcctgggcacgatcagcctgttctccaagccgcacctgaccttcaatgaagatcacatcctgattcaggacggcaagaccaaggtcaagtacttctatagctcgccggcagttgttgtctcgccgccggacaaggatatcgtgctgaccgatccgctgctgaccttcgaactgaccgaaggcaacatcaaccagattcagaaggctgcggctactctgaaactgaaggaactgtcgatccgcgaaggcaagctgaccgcactcaactcgggtggcgttggcaatcagatcaccattgagctggataccgaaggcaagatgagcgacgagaagctcgtcaagatcgagaacctgaagctcatcgaaggttcgtacaatgtcaaggtcttcgagcaggcagttgagttcagccacatgaccaagccgggtctcgtctacctggtcaccgtcgaggccaagtaagatgacggccatcttcgggaacattctcgatcaggcgctggagctaaacctccagcgccaggccatcaatgctaactaccgacacaacttcgagccacatatgtggatgcgcgagttctgtacggttcgcctgcagatcggtcgtggttgtggtcacacaatggcaatccgctctcgttctaagcgagatgatttggtgattgttccgtcgtcattccacatcatgacgatgtctgagaatcgagttgagaagcctactgtcatttcctcgacagacccgaacgccattgtccttcgcggaaagactttcaagcgaatctgggttgatgatgcttcgattcgttctgatggtgatattcggaatgtgtatgtgattgcattgatgcatcgtgccgaacaaattatccttgtaggctgatttaacaactgtgagatattgataatgagtgacgagaaagaaatgtacctgtggagtgagaactatcgtccgcacactgtgaatgactgtattcttcctccacgtttgaagacctacttccaggcaattgtggataagggacaactggccaatatgacgttggttggtggaccgggtacaggtaagaccaccgtcgcacgtgcgatgtgtgaagagctgaaaatcgatcatatcgtcatcaacgcgtctgagaacggcaacattgagacgattcgtactacggtacgacagtttgcatcgacggtcagcttcggaggtggcatcaaggccatcatcctggacgaggcggacggtctgacaaagaatgctcagcaagctctgcgcgcctcgattgaagagtttgcaggcaactgccgcttcatctttaccggcaacttcggtaatcagattatcgagcctctgaccagccgagcacctatcgttgagatcgtcttctcgaaggaagagaagaaggctctgctgatggagttcttgaagaaggttgcaggtgtccttaagtcgaagggtatcgcattcactcctgaagaactgactcaggttatcgtcaagaatttccctgacttccgtaagacttggaacctgatccagcgttattcggctaacggttcactcgagattacgagtcagactggtatcaatgatggtgctctgaaagaactgattgattacctaaagggtaagaagtttggcgacatgcgcaagtgggtcgttgatcacctcgacaatgatgcagcatctctgcgtcgcagcctgtatgaaaagatggctgtctttgtcaagcctcagagcattcctcagctggttctgatcatcgcagagtacgactataaggaaggtcacgtcatggacaaggaaatcaacaccgttgcgatgttgactaccatgatggcggacgttgaattcgtataaatatctaggaggtaacaatggcatctatgagtccatttgatatcgcctcgcacatcaacgagaagaaaggtgtgctggatgttgaagaaattggctatagttcgtacgtagtcaacaaggtactgtcgaatacaattgatagtgtcttgttcgcgaatgagatgaatcgttactggggacttccaacccaggcgcaatttgacttctattaccatggtctgccgaagaagaagcgtttcggcaagtggcacaagaatcaggacgacaccgcgtcgctcgatctaattcaggaatactacggatatagtcggaaacgagccaaagatgtgctcggacttcttcgaccttatcttgatgacattcgcaaagaattagaaaaaggtggcaaaaatgtcgcaaaacagaaagcaggaacttcttgagtccttctttgaaattgaacctttgaacaaggatcagtttctaaaggtacgtgaaactttgacccgtattgggttgccgagcaagcgcaatggtgatcagactctttggcagacatgccacgtcttccataagcaaggtcgttactacatcgtccatttcaagcagctgttcctgctcgatggtcgaacagatgtaaccgactttaccgatgaagatgaagatcgtctggagttcatcgtaaacttgcttgagcagtggggtttggtcacatcactggttgaagttgacgccagagttgaatcaaacgtaatgattatcccttatcgcgataagcataagtggagccttcgtgtgaaatactccttgggaaatactgataatggcgagagctaagaaagaagagcaggtcactgacctgggcgcgctggatatgtccagcgtagctgtcatcggacagattgcatcgttcgaagatgacaacgttggcttctatcagaagcgcaacaagaccattcctgattatgcgacagagttctcggcaggctttgacctgagcgttgacattgaagcaggtgacgtaatcaacaagtacgatcatcgtaatcagaaggttgagatcactgctcgtggacaggacaacgctccggcgagactgtatctggagccaggtgatcgtgctctggttccgaccggcttgcacgcggatatcccggaaggctactacatcgcgattcatgcgcgtagtggaacttcctggaagcagggtctgattctgacaaatggcgtcgcagtgattgacgcagactacgtgggcgagatcttcatctcggtcaccaataacagtggcaccagggtagtcctagaagacggtgagcgcattgctcaggggctgctaatgcccgctgtcaaggcacccttcaagaggcttgacactaagccagcacaaaaaactagccgcgcaggtggctttggatcaacagggagcaagtaatgagcgatatcaagttggtatggaccactcacggtcagatcctcggtgaagtcaccgccaagggcgatggttacgaagtagagaatccggtattcatttcgccgggtgggcagggtgtcagcatgctgcctgtgaacatgttctccgatgaaacgaagatcactctgacgaaagaggaccttcgcttcggtggtcacctgttcgagccgatcactgagctgcgcaacgcgtatactcagcagttcggatcagggattcagcttctgagctgagtcggctgaaacgccatatctcgccgagatcagcttgctaacacttgctgatccggcgatgacgcctagataggcaagccagataaactcaagtgatgctgccgctggcgcagtgatattgatgaataggaacgcgatggtcgccacaaaacaggcaacgacgttccagaattttgtagatgacacggtcagggtgcccggctcgtagaacatagagctgaggtcaagtttcctgattgccttgaacaagacataagcaatcattagcatgaagactagtgctgcacatgaggcagcaaacaggaagccgttggttccaatggctagccatgctagaaatgaggagagtaaagacataatggcgttctataccttttgcgattcgattggaagtaagatttaccacaggtatgtggacgatgccggaaaacgccatcaagaaattgttacaagttttcctatcgagctatttatcaaaggcaatggagaatacaagtcgctctatggtgaccgcctcagccgcatgacctttgatacgatttcggatgccaaagacttcatcaagaagtacgaaggtactgtgcctgtctttggacagacttcgatgcatcaccagttcatctctcatcgttaccctgagaagattgaattgcagtttgacaagtatcgcgttctcaacttcgatatcgaaacccgattcgacggtaaggacgatgaagatgaggtgttggttcgtaaggtgttcagtcttgaagaagagaccgtcaccgttggttacatgaagactctccaggacgtttgggaagtctatgatccgatcaacgagcgttggtatcctgcatctaaggcacctcagcgcaatccaggtggcttccctgacgcacagaatgcagcatacgagatcacgtcgatctcctgcaaggtgtttggtcgtcctcagaaggtgaccttcggtacgaaggaatatgaggtcaaggataagaatcagatctacaatctgtgtgcagacgagcgcgagcttctgcagcggttcattgactttgttcgtttggttgacccagatgcaatcactggttggaacattgagtcgttcgacgttccctacatcgtgaatcgctgtcgtgctctgttgggtgagaagctgacgaacaagctgagtccgttccatgctcacactgatcgttgcattcaggactactggattgatgacgacaagactgagaagggatatcgcatcttcggcgtgaccactcttgattacatggacatgtataagggttacaaccctgtcaagcgagacagttacgcactggacttcatctctgaggttgagctgaaagagaagaagctggattactctgagtacggcgacctgatggggctgtatcgtcagaactacgaaaagttcattgattacaacgaacgagacgtttacctcgttgagcgacttgatcagaagaagcagttcgttcgacttgtgatcaccaccgtcttgatgactaagagtcgatatcaggaaaaggacggtaaggtaaagctgtgggacaatctgatctacaatctgctcaaggcagagaacatcgtcattcctccggcagttcagaagcacggtcgtagcatcattggcgcatatgtcaaggagcctgtgcctggcaagtaccgttgggtatcttcgctcgacttgacctcgctgtatccttcgatctgtatgatgttcaacatgagccctgaaactctggttcgtgaagagcaaggtcagctggattgggttgagcgtctgttgaagggcgaagacctggctgcggattgccgagctcagggttgggcgatggcagcaaacggctcggcgtatcgacaggatgtgatgggcgtcatgccgaagggtatgaagttcgtattcgatactcgtaaggctgagaagaatcgaatgctcgaccttaagcgcgagaaggaagcatatcttgcggctggtggcacggaaggctcggaagagtatctgcgtctcgataacctgattgcagcggcagacgcaactcagggtgcgatgaaggttctggctaactcgggttacggtgcatcggcgaacaagggcttccgttacttcaacgtgagcatcgcggaaggcatcacattgaccggtcagctgggcatccagtacatcggcaacatgatgaacaagtacctcaacaagaagtttggtacggagaaggattatgtgatcacatccgacaccgactcggcttacatccagttggagaacctgccttcggatccgaagaacattcagaagtcggttgatgagattgacgagtttctcgagaaggagttcacaccgttcatcaatgcagcatatcagaagctgtctgatcgacttggcgcaaagaagaacctgcttgatatgaagcgagaagcaatcgcagacgtcggcatcttccgaggcaagaagaactatgttctgcgcgtatgggacaacgaacacgttcgttaccatgagccagttctgaagatgaccggtatcgagactgctcgaagcgacaagccgatgatggttcgtaagaagctcgagagtgacctagagatcctcctgacaggaactcaggaacagttgcttacttccattgatagtttcaagaaggagttttataatgctcctattgagaacattgcttcgccgaagggtgtaaaggatctgacgaagtggattggtgacagcggtgaacttttgccgaaggctccatatcacgttcgtgcagcatacgcgcacaacaccttgatcattgagaagggtctgcaaaagactgtcgagagaatcaagaacggcaacaaggtgaggctgatggcgctcaaggcaattaacccttgccgatgcagcaacatcgcattcaatggcactctgcctgaaggtttcgatcttcacgagtacctcgacaaggacaagcaatggaatgctacgtacatcactcctttgaagtccttcactgaaatcctcggatggaagactgaaaaggtcagctctcttgaaagcctattcggctgaggggtttaagtatgagtgcagctagcgagatgttgaaactgttggccagtttgcagaacgaactggtcatggttgacattgacccggaaatggctgagtttgcggaacacgaaaagatccttgatgttttccgacagactgtagcatcaattgaacacatctatcctatggtgcaggctgtcgaagaagtcctcgactggtctatcactccagctctcttctatcacaaatggaagagagcagctgctcacatgggtgtcgatgacgacattggtgaagaagatatcggtccagacgttcgaggactactcgatcggtttagcgacgataatgacgatgaagacgaaggagaagaaagttgagtttggttgataaattgatgaagcagtctacgattaaagagactgcatcgctggagaatagcaccttcttccagaaaaaagaactggtgcagacaaagattcctgtcctcaaccttcttcagtcgggtgagcttgatggtggttttggtcctggtctgaccatctgggcaggtccatccaagcacttcaagaccagctttgtgctgacgaacatgaaggcgttccttgacaagtacaaggatggtgtggttctgttctacgattcggagttcggtactcctcagagttacttctcgtccttcggtattccgctggatcgcgttgttcatactccgattaccaacatcgaggtgctcaagttcgacctgatgcagcagttggatggtctgaaccgtggcgataaggtgttcatcgcgattgactcggttggtaacctggcttccaagaaggaagtagaagacgccctggaaggcaagtcggttgcagacatgacccgcgcaaaggcattcaagtctctgttccgtatggtcactccggtgctgtcccttaagggtctctgtatgcacgtcgtggctcacacctacgatacgatggagatgtatgcgaagaaggtcgtgtccggtggtacaggtcttatctactcggcagacaacatctatatcgttggtcgtcagcagaacaaggatggtcaggaagtcgttggttacaacttcgttctgaacgttgagaagtctcgctatgtccgagagaagagcaagattccggtcgaggtaacgttcgagaacggtatttcgccttggtctggtctgctcgaccttgcacttgaaaccggtcacgttgtgaagccatccaatggttggtaccaacaggctggcactgaaaagaagctccgtcttgctgatacgaacaatgctgcattctgggttccgatccttaccaagacagactttggtgcaaagctcaaggaacacttccagcttgctcagactgaaatgatcaaggctggaacgatcgattacgaaactggcgaagtgattgaagaataatggttaagaaggttctaccaacaacgacgaactggctctatgctaaggagcctatgctcggagcgccaaccattgcgaacatcacgcaatggttgcgtaagaacaagctgacggttgtccaaaaaggtcgtcgtttgacagtgaaccatcgagccaacgtagagcctgtccgcctcgctgacgaaattcagttgaggctggaaggctctcgtcgaatctcaaaccttgctgtgaacgtcaatggtattgctatcgtcgtatcggctagcctgaaaggtaacgctggtgaggacaatgaagaatacttgatgcaccgtgtcaatcgactcgtcggttggctcggtggacctgttgacgtgaccttcaaatcaaagaagaaagcgtttgagatcaaaggtgttgttgaagtctatctgtcaggacgcgatacgtctggacataagaaagccgacgttgagttttggactaagagcgggaagatgattcctgtatcattgaagcaaggcaacgcttcattcttctcttcggctgactcggagctcaaggaaattgctgaggcttcggtgcgatacgcatttgagaacgccttgaccaattttgaaatggatcctgcaacaaagatcaggaagatcaaccctgaccttgtgattgaacctacagataaggaaaaggaatttgcccttttcggaaatgacatcttgaaaggtaaaggtgctatcattagacagtcattcaccatgaatgatttcttccaagatgtgcccaacaagctgttcattcacgtcgaagacatctggcaagaacttcgtgatgtgccagagattgaacagcctgtaattcagatcagaaacgacaaagatagaaaccgaagccacccactgctcaaaggtctacgtgcgctgacaatcaaacgtgctgtagttcctaagaatgctagatggatcgaccgtgagaaactaaaataatggaactctacgtaaaagaagcccgcgaagactaccttgaagtcatcgacttgaaacacccgcagtaccttttcatcttcgatggcattcatgttgggaccaacaatggcaagctagaggtccttgtaaataaagcgtcggtacagaaatccgacaaagcggaagagtctaaccccgatgcaattgtcgcggatgaagatgaattccttagtacacataccgaactaatcatcaacgaactgttccgtggtccagttgaaacggcacttggttgatattatcatataggaaatcgtaaaggaaagtaacatgcagaaagaaaaaaccaatccagaactcggtcagcgcgttcacaagcacctcgtcagcctcggcattgaaacgccaatcactgagctggtgaatgtcccgagcaaagagaagatcgcgaagatcgaagagttccagcgccagtcgttgctcactctgggtcttgatctgaccgacgactctctgatcgaaactccgaagcgcatcgcaaagatgtacgttgaggaactgttctacggtctggattacaacaacttcccgaagtgcacagaagttgataacaagattgaatacgatgagatggtgattgagcgttgctcggtcaagtctgtctgtgaacatcacctcgtctactttggtactgctcaccgtcccgatctgtcttgctgggtgtcttacatgccaggtgagaaggttctgggtctgtcgaagctgtctcgcatcgtagacttcttcagccgtcgtccacagattcaggaacgcctgactgtgcagattgctgagaccatcaagttcatcactggcacggaagacgttgctgttgtgatgaagggtcagcacttctgcgtactgactcgtggtgttgaggattccgatggcgtgaccatcacctctagcctgagtggttcgttccgtaccgatcctacgctgcgatcggaaatgatgtctttgatcaagggttgatatgagcgagcacctgaaagaacttgaaagagtagccattgaaaggctggttgagtacggtgatcctaagggtgtgtatgttgcgacgagcggcggaaaggattccgtcgtcgtccatcatctggctcgaaaggtgttcggtgatcaggttcatttgattcacacacctaaggtgaccggtttcaacaaggtacatcctgcgactgtagcattcctctatgagcagagtgcgaaatatggtctcaacatcgttccatttgaacgtatgcaggagtatctggataccaacaagctttggatccaaattgacggcactcgccgttccgagtttgatcggaccgatcgcagtgcagacgtcgtagtgaatggtaagttgatcagccgagcggacatgcctgttcatacggttggcggcttgtttggcaatgaatcaattttccctattgtggattggagtgatgatgatgtatgggcatatattggacagcaaggtattgaagtcaccgaggaatatcgtattctcgccacacgttgatgatgaagtgatcgggtgctttgaagcgcttgatcgaggtctgatcacagacgttgtctacttccacgatgtcactcctgagcgtaagatcgaagctctgaaaactgctgagatgtttggcttcactccgcatttctgtgattatgattggtacggtcttccgaaggaaatcgacaacatcaaatcctatgatacgatcttctgtccgaccattcgtgattcgcattctcagcacgctgagattagcatcagagctcgaatcgtcagcaggaacactggttgtaagttggtgttctacacggtggatatggattcgttccaggcaccgcttcctccgaaggttcgggcaaagaagaagtctgtccttcaggaactgttcccttcgcagagtattttgctgacgaatgagaagtatcatctgttcgaaggttatagtgagactgatcactacgaaggcatcgagttcaagattgacgatgagcgaaaggtagtgatgaagggttatcgggtgccttcagtcctcgaagcgccttgggatgattcaatcaaggacgcggactacctcaacatcctgatcactcggtatttcaatcggatggcggttagttacatcgcatttcacaatggcaataggtgggtagaatttaatggctaagattggtattgaagtagaaggcatgctgcgcggagagaacgttcgcacttatttctgttcggcaaaagaatacgtcgaggcagatcttctcaatctcatctacaatctgtatgtgaatagtattgagatgatctacatttcggatcatcacaacgagcttgacctgcatcacctcgcagaagtgttcaatgatagtggcatcggtgtcactgttgaactgaccgagttgaattcggttccgcctgcaggtgttgagatcttctggaatgtttcgcaggcttcttatgctcagtctcgtactctgcatttcctgcgtccaacggatcagatcaagatcgagaatgagaaacacgttcttgcattcgttgcaggcaatgcggtaatcacttatcctgaggactttaatggagacattgaagtatgagtgaagatttcatgagtggtatgatcgaccagattccggaacaggcaaagcgaaatctgttcatcattccgattgagcctctggaagagagatacactggcgagtggtacaagttcctgccacctgcctttgccaagcacaatttcaaggtcacccagattgatggcgagactctgaccgattcggttgagactggcgcattcctggatatgaactcgactatcttctacaaggcatctcagatgcagaagattgctcgtatgttccgtgagaagagcattccgaatggttcggtcttctttgtcagtgacttggaattctggggcattgaatctctgcgcctgatggcacagatcaacaaggtcgagatcaagatctatggcttcctgcatgcggcttcgtacaccactgaagatgcattcgcagttgcagcgccatatcagaagtacactgagctgggctggctgaaagctgttgatggcgtctttgtcggttcgcactatcacaagaaggcagtgatggaacgtcgtgtgaacgcgttcgcgaacgaagctgaccgtcgtgagattgagaagaagatccacgtgagtggcaatccactcttcccgagcgcatatgacacgacttcggttggtccgaagaagaacaagatcgtgatcaccaaccgattcgattctgagaagcgcccggatcagagtttgctggttgcactccttgtcaaggaagcactgcctgatacagagattgttctgacgaccagtcgtccgactttccgctcgaatcagaagtggttggttgacctcgctcgcatgtacgagaaacaaggtctgatcaccatcaaggaaggattgaccaagaaagagtatcacgacgagctcaagactgcgaaggtcatgatctcaaactctatcgaggaaaacttcggttactgcattgtagaggctatcatgtatgacgtggcgcctgtactgactcgaggtctttcgcacgttgaaattgttcagggctttgaccagttcctgttcgacaccaacgacgaagcagtaagtaaggttatcacattcctgcaacgcgatcagcttctcaacgcgaagcacttcttggattcttactttatggctgctgacttcatgggtcagatcatggcccaaggatgatatgacagataactacaacggaaacgaactccactacattgcaagcggaacgtctttcatgtacatcaactcactccgtcgagatggcggagtgaatgatgaaacgattgattgggtacgcaacatgttcgtaggagcagatcgtggacctaacaaattcggcatgctgttcaacgcgttcactgaatcgaccttcggtaaggtgttcaaggagaactatgctgacgtaatgtgcgacattcacgcagactcaggtggtctgcagatggtgtcgcttggcaaggttgctgatgatgcagctaagcgcaagatctacaagactcaggctgattacagcactgtagcaatgtcgttcgacgaaatccctgtctcgcagatctttgatccgtatgctggacgtggtgcaatgtcggcgacgcgtaagaaggtcttcgatcgctctcagctgaaagctaaggcaattgaatcaggaaagaatctacgtgaacagcttgaatactttgcggaagtcgggacgatcgctaagcctatgcttattgctcaaggcaattgtccagagacctattatgactgggttgagtacgtccaggatcagatccctcatgagctcatggacaatatcgcaggcgttgcagtcgcaacctcgacgcttggtcctggagatctagagaactacgaatcggcgtttgttgcttcgcagatgaatttccgttttgactgcaagcaaatccacttcctgggtgttggttcgtttgatcgtcttgctcctgttctggcactagctaagtcaggcgtctacaagaacaagatcatcagctacgacagcactactcacacaggtgggcttgctcgttcacgattctacacacgacgtcctgacggcacctatgttggaactcgtctgttgcaatcggatggatatcgcccccgtgattatcagttcatgatggatcacattggcaagttcaacatcggcttcgatgatccggaatcgctctacaagtatttcatcacttgcccgagctattctgccgttgaggcaattggtgagtcgcacaatcgaccattcattccaaagacaaagattgctctgttccgatattcgtacgataacttcatcacacagattgaagagtacatggattcggatggatacatgaagggcattcgtaaggcgcaccagcatcctatcgcaggtcttgctgaatgtcgcactcgttccgacttcaatgtctggcactcgacgttcaagaacgtgttgaagtcggacagagttcgatcgaagcaacagagcctcgaagagcttttcggttaaagacatagcatccgttgattcaccgtcacggatgctatatcatagttggaccatttaggagaaccattagatgaaaaagatttgggtaacattccggaaggcaggctttcaccgctacccagcagccggcacccaaggactcgaagacgtcgcgtaccttgcacaccctcaccgccacctgttccacttcaaggtagccattgaggtcttccatgacgatcgtgagatcgagttccaccagttcctcaacttcttggaagaggctgttgcactcaacggtcttgattacaagtcgtgtgagatgattgcagatgatattgcaaagattgttgctttgaagtatcctgcactctaccgaacccttgaggttgaagtttcagaagatggcgagtgcggcgttcatgcaatctatggcatcagcaatggcgaggtattcggctaatggcactgttcgaagtatcggaaatcttcagctcgttggagggtgaggcacaattcactttccatccgaccacctacattcgttttgcacgatgcaacttctcttgtccgttgttcaacaaccctgagaagctgattgatgcaaagggctacgcgcctctcgatttcgatccgaaggactatcaacgtctggaagatattccgctgattcacaaaggctgcgatagtcagtatgcagtcaatccgatcttcgcgcacatgtggaagaagtacgacacggacgcattgattgatgctctgttcgaggttcttcctcagggtaagctcatctacagcactggtctgcctcagatcatctctttgactggaggtgagcctactttgaagtggaagttcattcctgagattctgttccatcctcgaatgaaagatgcacgtcactatcttgttgagacgaactgctctgttccgttcaaggacgaattcatcagcaacatctacgagtggcttgcacaagactcgcgccgcatttggacatggagcaattctccgaagatctcgtccagtggtgaggatcgtaagcaagcgattcgccctgagattgctcttatgcagcacgttttgacgcacaacttcccggggcgtgtcaatcagtatttcaagttcgtcgttgatggatctgaggctgattacgctgaggtgaaggaagtgatggagatctactacgctgctggtctgcctcgaactgttccgatctggatcatgcctcaggcttgcactgacgaacagcagaaggttacggcgcgcggcattgctaagcgatgcattgatgaaggttggttgtactcgcaccgtgtgcagaatgatctgtggggcaatggcgttggcacctaagatgctaacgtatcacgaatggatggttgcccacaaatactggggcaactatcacgccgagtacggcaaatactgtgctaagtggagaagagataatgaagatcagaatcgaatggacaagcgatagcagtgattgcgaaacctgtggttgtaactttgccgacggtgcgaacgtctacattgatgaagtccttgcactagagttcattcctattgctcactgctacgatggagacgatttcactcgtgattacgtgtatgcgcaaattcttaagcatcttgggcatgaggtcatcgagggatgaacgagattccgatctcagctgcacagcacgtagcgaagaagtatggtttcgaccagatcataattattggacgtaaggtcggctcccacgagcacgtcacgacttacggcgttgacaaagagaactgcgacgcagcagctcttgcaggtgatcatttgaaatacaacgtgatgggttggccaagaccatgaacgatgagaatcgttggactgtgtctggcaactggtatcattggaagtggcggcgcctagcgttcgccccgacctgttgggacaaaggcatcggagattccgatggcgagtggttctacattggtatgggcttctacttcctcatcgtcgacctaagacaaggaggattactatgaaactatttcttaagagctatgatggcggcggagattccggcgtcacaggctattggttgattgagtgcaagtctttgttctcaatcgtattgcttcactttgaaggcaagagtcgcgaggcattccattctcacgcattcaatgctctgacttggtggctcaagggagccgtaaccgaggagatgaaggatggtcgaatcagaacttggtggccttcttggaaaccaaagtggacgccgaagaactgcttccacaagattcatgctgatcctaaaggcgcctgggcactaagcattcgtggtccatgggatgcaacctggtttgaatctaagaacggtgaaacctatgaattaggtcatggtcgtgtcagaattaatggtctagttgagcaggattccgaatgagtgaagtaacaaatgagcgccttgttctctcggcgctggtaaagaatgaagagtatatgcgcaagattcttcccttcgtaaaggaagaatactttgaggacgagtcggagaagcgcgtcttcaagatgatcaatgcctacgcgggcaagtacaatgagatgcccgacaaatcgactctgatggttgaggcaaagaatgatcgcagtcttgatgaaggtcgtagtgctcgagtaattgaaacagtcgcagacgttttcagcatcatccctagccagaacttcgattggttgaagcagatcacggaaacctggtgtcaggaacgagcagtctacaatgctctgcaggaaggcatcgcagtctatcagggtgagaacacaaaactctcgattgcagcgattccagacatccttgcaaaggcgatcagtgtcacgttcaacacacaggttggtcaagactacttcgatgacgctcagctgcgatgggacttctacaccaatcctgagtcgaaggttccgttccgaattgatacgttcaatgagatcacttcgggtggtctgactcgcaagacgctgaacctgttcgttgcaggtaccaacgttggtaagtctctggcactggtcagcctggctgcggattacattcgcgatggcctgaacgtgctctatgtgtcttgcgaaatgcgagaggaagttgtgttccagcgagtggacgcgaacatcctcggcatggatatgaacaagatcactgacattggtcaggagaagttcctcaatcgcatcgagtctctgaaatcgaagtcgtacggcaagctgaaggtcaaggagttcccaccgacctcagcatcaacgttgaacattcgacagacgcttgacgaactgaagatgaagcaaaacttcattccagacgtcatcattgttgactacctgcagattctcgcatcgtatcgtttggcttattcggttggctcctactacttcttcaagtcggtggcagaagagcttcgcgctctggctgttgagaccaacaccgttgtgtggtcggctgcgcagtttaaccgtggacagatgaacgcgacggacgttgacatgagcggtatcgcagagtcggcaggtatcgctcacacggctgacggtatgtgggcaatgatcagaacggatgaactggatcaggtgaatcagcttttgattaagcagctgaaatctcgatatgcgaacaagtcgatcaagaccacgttcacaatcggtgtaaagatcgagcatcagacactctatggactggacgatgacaggtcaggtgagttcactcaaatggactcgaagattgtcacagaccagaactcgctgaaggacaagttccaaagcgccaatggcggaagcaaattccaaggatttgaagtgtgatgaaagacatttggccagaactagtcaaggaatacgagcctctcattggggctctgtatcgatgtaatgaacacacctacaccttcttcggattggtgcacggtggtgacgactattactatggcatgtggcaacatggaacaggcaagtgtgagctcttgtcctgtgtaggtgcgcccgaatccttcggatacttccgaacacgaaacgcgacgagacacaaccgagtcggctacgctgaaatctgagccgaccgcagtcctatgtccgccagactggcccagcttttaaaagcgtatccagtaagttcctgattctgttgatattcttgacgggaagccctgctcagaaccaccaatagaatcagacacttacaagcctagtactgctaaggggtgtgccaggctcgagccagatgaccactcaaggtgacaccccggtttcccagggtgtcgagtggcctgcattgtcagatgtcagtccactatcagaatcccttgatcagggtcgtgtccgccatgtccttccagtcagcggcagaggtcttcatgaaaccggcgagctggttcaccgtacggatcgagaccgaccgcaggctcatcaagttgtcgttcatccacttgacgcactggtcgacctgcttctgatccagaccgaggtctgcacctagggtcgattccttgaggacctgctcgacacgaaccatgatggccttcgggttatggatgcacaggtccaggaagatcgaccgactcatgagagccagaatgtgcggagccagtcgaccttgcttggcgacgatgcgatccaggtcgaggttggtgatgaagacgatctgaccttcgtactggaatcggttcgggatatcgctgtctgcgaggtacttcgatgccttcgaccagctgatggtccgaaccgcactcgtgtccagcgctgccttcagaatgttcagtgcttcttcgtcgtagaacacgcgatccacgtcgtcgagcagcagcacctggcccttacctcggttcttatagagcgtctcgtagagaccgacggcgctgatcgtgcccttggtcgagtcgtaggacttgatcttcttggtgcgctctgcttcttccaactggcgctccaaagtgaaggtcttaccgacacctgccgaacccgacacgatcaacgaacgaatgttgccgttgaccatgccctgcccgagcttctcgagcatgttgaatcgcttgcggatcatcgcagcatcaacgggcttctcaggaacctcgacggcgctgtcatcgtcatcgtcgtcatccgaagcagttgcctgagccaagccggctgctgtaattgcccaaagaccacgaccgatcttttccagctcgccctctttagcgcgcttcaaatactctcggttgaactgaccaagttgacccgtcgtaacggtgtcgccaaacttcattctcagttctttcttcatcgtagcggtggtgctcatgatccagttccttaaagtggttttgcctgacatctgacaaccacaattatacggatttcttccccaggaacaacctacgtaagtgtctgattctgttggaaaagccaaagctaccaaggattcttcggtacacaatcgaaggattctgtgccgttctggctcgatccactagaattggacgacataaaaagtgaggcaattcgtcatgggtggcaatgcagttttcaatgatctttcggctcagccggtctctatcgtctgtcaagatagcagggatttctggagagcgaaaattgagcatctcatgctcacaatcaatcacgtcgcacgtcgaaccctctgggatatgagtgcaggcgccaagccttatcttgcaggctcaaccaagttcatcttcgatgacttcatccctacagctgagcttgtcaagtacaagaattccttcggtgacattgacattcaaattgatgttgagaagggagccgacttgatgtctgtcctcaatcttattagcgcaaatgaatgtgcaaatgagttccagattgtcgggtggcagcacacagtagacacaatcgtgaccatgtggtacgatgaagatgtgcagcagacgttccaagttgattttgagctcgtcgaattcgtcaacaatcgcccgacgaactggtctagattcagtcgatcgagttcctgggaagacacctgcgccggaatcaagggatttgctcacaagtacatcttccgtgcgatcactgctatctggcttcgtgaagcgcaggtccagctcaagacaaagttcgtcacaaaaaatatcagccctatcgtgttcagcccgaagggtgctcgagtgaagtggcgagagattcgtccggacgtctggcaagagattcctatggacgaggaagctctaatcaagaacgtcgaagacctgttcaagctattcttcaaggtcaagccagatgccgagtcaacctgtgagatgtattcttatcagggcgtcgtcaatctgatcctcacctggattgacaaggaagatcatcttaagatcgccgcaggtatgcgcaatcttctttggggtccgtatgctcagaagctgtaccgagacaatcctgcacgagacttctatgaaaagggtcaggcttatttgtatctgacagagactctgggaatcccggtcgagcccttcttcggatcggagaaatactatgagacgtattgatggcgttcttcaagacgattgatttcctcaaaagaaacaacgcggctattcttatcaacatcgtcttggcaaaggacgtcatgacgattggtaagaaggtcgacggtgaaagagttgtggttgaggctttgatgctcggtgacaagccatccgagagtgaggaagagctgacccaatattgtctcacagtgaaaggttcacctccagcactctgggcactcgacaattggttccctgtgacacggttcttcaaggatcccaggttcgttccaaagtcaaccatcaagggaacacctgaggtacgtgataaggagttccagcagaggcaagagaagtcattggttgacgtcatcaacaagtggagtcaaccgatcaagctggaaaacttccacatcaaacgagccgaacaggctcctgagattggaccacacggaaaagagaacctagttgatgtcgtggtatgggacgaacacaatttttcgtataatgtgagctgtaagatgtctaaggcagctgaccttggctccggtggcattgctggattgcagaagtcggttcctgagttggtgaccaaactctactatcaagtcaagattgatctgtatgagttaggtttcgaggaagggaaggtgtacgatattcgtaacatcccgactgtgatgtacggtattccggacatctacgcgtacaagatgttcgccggatcagatgaggttggtggcaagattgatttcatctacgttggacccgatcaggttgactacaatggtgaggagttcaacggcaagttctggccagtggaagagtatgctaagaagaagccatactacctgcggctgagaaagagagacgttcatgcgaacatggttcgtatcaacttcactaagctcaactcacacggacttccttgcattttcacaacaggattgggcgactttgcagcagcccgtttcgtaattgatgatagagtgccacctaaggcaactgtgaggcaactatgctagtagcagagaagaagcggaagaacatgaaacacttccgcgaaatgaatgatagagtgttctgtgaatggatccttggatatgaagtcgatcagattgatctgagttggaagctcgacggattcttcctcaggttcggaaaggacaaagagaacaaaccttggttccagactgcacgctcgcctgtgctctatgatccgatggagatcatctggcactcgcttgagaaaggctatgatcacactggcatgagccgtgctgaggtctacttccatctcatcaagaccatctgggattcgaacatcatgaatcacttgccagaagactctggcttcgagtgtgaagtgttcgacaagtcgatgtctgtcttgaacaaggagaacaacaccagaacgttcgtgaacattccgtacgacgaagagttctttaagacagatctcacgttggctatctacaagctcattgaggcagcaacagctgagacatggattgatgggtactactgtgacctgaaactagacgacaacatccagacattcggcactcgtttcaagattgacttcaccgcgaaatactatttcgagtgtggtgtcaaaggcatcacaggcaacggaaagcttcttcctattctggaatctcgccgacaggcagatagagaaaccaaacttggaatgaaggcagtgatcgcaacactcaaagatcaattctgttactatgtcttgaagcaggctcaagaccatcacaagatgggaaagaatttcgaaggggttgtcatcaccgtaaataagacagagtacaaaattgtcacagactacttccgagacttgatctacttcaagggagtgatgggtggctaattttgacttgttcttcggaaggttccagccggttcacagtggacaccttgctgttctcgagaggatgaacaaccctgttgtcgtcatcgtcaaaggaaaggtgtcatcgaaggacacggagaagaaccctttcgactttgcctatcagaagatgcttctagagaaggtgaagcctgatgttagggtgttccagtcagagactggatatctcccggacattatcaagatgcttggtgattgtcctgatgctgtctactgcggtcccgatcgcattggacagtacaaggcgcagatggaacgcgccaacaaagagcttgatgagccgtgtctcgtcaggttcattgaaacggagcgtgtgacatctgcttccgttgttcgtgaggccatccggtctggcgatagaaaagcctttaaggccaatgtccctagagcaatctgggatcagtactcaacaatgaaaaagaggttagaaaatggttgacttgacagtaactattccgtcgttcgaagacttcctggcagaagatgcaaaggcaatctcggatgcaaatcatcacaggaagaatggcgacggcgaaggctgcgacttgaagcctgttgtttcggacaagggctcgaccactccagaagtgattgagaagtcggacaatgctgcacctggcgacgacaatggcgaaactctgcctaagccaccggtgagctaagatgagcgaaggcgccaacgtaactgcaggtgtggcgaatccagacaacgtcatgccacccgagaagccacagaagcggaagggagaaggagagttcgcaaaggaaatcaatgcggctgtctcacaggctggtaagaagctggtagagtctctgttggaagcgaaggcgcctaagcaatttggcttgggcgacaaagtaaaactcaacggcaagcctgggcgaatcacttcggttgtcagcacgacagctgaagatggaaatccggggactcactggaaggtctctatcaggtacgaagatggcaaggaaaagacttacatgtctaaccgtgccaagatcgttgtggtagagaagcaccctcagtacaacaagcaagcagaatggcatcaaaaggatgctatggcagctaagcgtggtgcagactacactcgtcaccactctgagatggccaagtaccatgataccatggtcaagcatcacgactacgaaggcaacactgaagaagcagacaagcaccgcgcagcagccgtgacgcatcgtgctgaatctgagaagcgtgctaaggaagccgcagcaggcggaggctttgtaaccaagcgtgagatgcagtccaagcaacagcaagcctatcgtaaccatgtagctgacgaacgcgaaaagaagcgccagtgggaagaagctcgtaagacagccgcggctaatcgcaagtcctacaagcactactactctgttcctttcgctgacaaggatgaagctaagtcgaagggattcaagtgggatccaaacgagaagaagtggtacgttacttctcaattcccgaagccaggcacaatgaagtggaaggcttcgcactccgtcgatgaaaagacaggaaagaaagtcgatgattgatttcgatacatggttgtacgaagatctcaaagttcccaacgccaaggatggcaaagggaaaatgcgtcatggtatgccacagcttacgcagtttgatgcgttcatggcagacctaaaagacaacgacattagcacagaggtcaagtctttgagcccatggaagttgacgcctactcaaggcaacttcaatgaggagaaggttgactacctgatctcgagtgctaagtgggaagcgaagcctataattacaagtgccgacaactatgtcgtagatgggcatcatcgctggttggcggcagcaaagttcgggaagaagattcaatcgagagtcattggcatggattgcgatgacctgttgaagttcctcaagggcaaatcctatgttgaaacaaagacaattaacgagtgatattaatggcgcttcgaacccctgcaccaattagattttctctggagattccagagctaaacaagacgatctcttatcgcgcccttaaggtcggtgagcagaagtctctgttgactgttcttgagctgaaggatgcttcggcgatcatcaacacgattgtagacatcattgatggcattacgtttggcgagcttgatcttgctaagacgcctatgcatctcattgatttcatcttcctgcacgcatacatcaagtcgtcaggtgctcgctcaaaggctgagtacacctgtggtggcgagatcgaagtagaagaggaagtcgagatcgaggaaggcaagaaggaaattgtcaccaagactgttccttgtggatccaggcacgaactgctcctcaatctcgagaatgccacgattaaatatccagaaggatataaggcttctaaactggtacagatcgatgactcgatgtctatcaaactgaagatgcctgacttcgccagcttcaagaagctcgacctagacgcagacgtcattggtatctcagaccagtacatcttctctggcattgagtacattcttgatggcgagaacatgtctgtcccgggtgcggatttcgacttcgatgaaatgacgacttggctcaacgaactgccttccacggcgcttgatcagatcacggaattcttcgaaggcgttcctgtcctgtcccttaatgtggacgtgacttgccctaagtgcggcaggaaggatggtttcgagcttcaagggctcgacgattttttcctgtaatctatccagctaacaagctagtagacatgttagaactgaggcacctactagtaacagaacacggatatcgtctggatgaactggatgatatgcctttgttcgagattgaaatgacctctttgattgcagttgaaacccagaaaagaaagatgaatcaattaggttaaggtaaaatgcttccagcacttctaagaacagttggttcttcattgttgagatcagaggcggttagtgcaggtgctaaccgccttgtcgtcgcttcgagactcaacaaggtcgcaggtaacaagctagtccaaggacttgcgaaacactctggagcttccaaagttccggcgctggacaagattggtagttatcttagcaaggttccttcaggaaaagagaaggaaaagaaagaacgtggtacatccacttcttcatcttctaagaaccgtgataaggcccgtgatgatgctgccaagaatcaagagcgtcaagacaaggctgagaaggaatccctaggtgtacaggaagagaatgcaagccttctaaaggtcattgcaaaggacactgtacgcgtccgtgatgcggtcgaggccctggctaagaacggtgtcggtggaggcgcgggcggtgatggaatgatggacaagctgctcaagaccatcacttctctaccagcactgctcccttctcttctcactggtcctgcgggcaaacttggcggctttgtaaccaagtttgcatctaagattcctggcgttggaagactcatggggtcaatcggaggcatgggtaaggcaggcgaagctgcaacgactgtagctcgtgcgggtgtagctgcggaagcaactgcggcaagagcaggagccgctgctgttggacgacatgctctccgcgatcccaagacaggtcgattcattgcacgtagcgcagtacaagccgccgaggttgctccaaagggcattctggctaaggctggtgcagctgctgcgggtgttggtggtgcaaagattgcaggtaaggcaacaggcgcaattggtaagggcatcgcaaagacggcaggtaagtctctactcaagaagattcctatcattggtgcaatcgcaggtcttggtctggcagcaaaccgagcatacgcgggtgactggacaggtgcaggactcgaagcagcttctggtcttgcaggaactattcctggtattggtacagctgcaagtcttggtcttgacgcggctatcctcgcgcgcgaccttaagaatgacggaagttcgacacctgctgtaaccgcagcagccaagccagttactgcatccaagcctccggtgcacacggctgcaattgcagctgctccagtggtagcgcaacgcaaaaccgcggcagcgactgactccatgcaggtcactatggcgaagatgcttgatgtgatgactgaccgctccaagggcatctacatcgttcctgctgaggttggagcatccactcttcagactcgctcgccttataaccctcagggtgttccaacaggaaacaaatacgagccaatcgtcagtgcaagtccatatgattcagcaccaagcagcatcggtcccgctacggcaggtcgtacaatgggtgagggaacatccgtaacctccggtcagacaatgcgaggcggtcgtgttgagattggtccaacgggaaactttgaacgagatcttctcaatcagattgcagcaggtgaggcaggtaaggaaggctacgactcggtatggagtggttctcgtgtcaagccaaccaagcctgtgtctcagatgacattcggcgaagtgatgcagtggcagcgtgatacgctcaacgaacaaaagagccgaggcatcccagcaaatcgtcgtagttctgcagtaggacgttaccagttcatcagtagtacactcaaggcgcagatggctgcggcaggatttaaggaagatgatctgttcaatactgagaatcaggataagctcgctcttactctgatgaaccagggtggcaaccttgacaagttcaagtcgggcagaatctcagcggagaagttccaagattacattgcatcacagtgggcatcacaaaagacagcaagcggagcaggcatgtataatgctgcaggcttcaaccatgcaggtcacagctcacttggattcttgaaggcagctcaagcgtcaggttctctgacggcatcctcaggttctccaactgcaatggtaagagatgctgcacagcagaagcaagccgcacgtatggcgccgatcgttgtcagcgctcctacacaggtcgttcaaaacgggcaaaaggaagccgctgctccaagaacaacggcttcggcaacacctgtcattgtgcgtaatccggactcgccggttcgctcctacgtactatcgcaaatcaggacttcttgagcttcttcttgagctcttgaatctcatcgtagtacttctgagactgggacgtcaattcggcgttccagactttgcattggttgagtcggtcaagatagagttgagactctcctgcgaaactccaaagaaattggctagtttgtggagaaagtagttctcctgtgttggtgttggatccgttactgccgctggtgcttccttgaccaccggtggatccggaattaccacttgctgatgggtcgcgcaggcggataccagcaagcttagacacagcagcatcgagagaagcagtgcgcgccacataggctttgtcgagttcattctttttgtccttgagactggtttcaaatgtcaatttgagattagcagatgcgccttcagccgtagccaccttggtcgccatttcggcaacctcggctttgtgcgtagcttgaatggcatcaatttgtagacccttgacataccagattgagcctgcgccaccacctacacccagtacgagtgcgatgccgatgccccaaaggaatgtctgggtattcaatgcgagtttgcttagcattataggtgccccagattgtaacgattagtgacgtcctttaggatatcgacaacaattcgatttggccagacgtcggcgccaatcgaccaatcatattgatgcaagaacatgagaatagcttttgcgacactgaattgaacatcattcaggagcactcgacagatagctgttaccttctttggtccaaagacatttaaagtgacaaccatattattgatcagcaacttctcattgatttgaccggtctttagaaaccggtcaatcatcttccttgtagtcatgaagacagcaaagtctttgtcaaaagtcttggcatggaagacgcctttaccataaccaccaagggcgatctctttcgccaagtctttcacatcactcatctgggggaccttactcggcagccttcttgttgttcttcttgctggtctttgatgttgtcttagcagccttaggcttggtctcttcgacttccttggcaacttcctcgaccgacttggtctcttccttgattgcctgaccctgctcttcgctgataatagcaatggcttcaacttcaccagcatcatctagctttgcgatagcaccaatcggagcatcttcaaggacagcttcgattacatcaacagcttcttccttggcaaaatcgccagtctctacagaaaatgcatctgccttgatagcagcaatctcatcttcgctcagttcacggctccctgccggcacgatcatatcctgcaaatcttcaagagaatgcgtgcgctttgaccaaaccactgcgtcgggcaatccacgaatcgacacgacgagctcgccagtgcttgggttgacccatccgaggtgagtagcaactgcacccttcacgacttctttagttctatctaccatcttgtttcacctttaattggacgaatgcacggcaccgcattaaaatagatcacatgaactatctagatttgaaatacacgaggctcgtgtcaagttatttacctgggtggaaggaggtaagtgcaaccttgtctcgttttcgttgcccgttctgcggcgactcgcagaagtcggaatcgaagactcgtggatacttctatcagattgaaggcaatgcgaatttcaagtgtcacaactgtggcgcttcgatgggcttgtattctttcctgaaagaggtagcaccagtactggcgaaagagtacacctttgagaaattcaagggagtcaaggcgttcgagactgatccttttgagaagttcatctcgaagccaaagtttgcagacaagactctcttggatgattgtcaggctatctcaactctggaggacgaccataaagcaaaagactacatcaagggtagattgattccggaaaagttcttcggtgatctctactactgcaaagatattcgtttgattgcagacaggcttgatgactatcgagaccgagaactgcctcgtagtgattgcatcatcattccgttctacaatgaagcgaaggaactggtctacatgcaggctcgtttctttggtgacgtttcgatcaggtacatcacactccagattgatccgaacgcaaagaagctgtggggccttgacagggtagattggagcaagaaggtctacgtctgtgaaggaccgttcgacgcgatgtttgttgagaactgtatcgcagtcgcaggcgcaagtatcatgtctgaaattaaatacctgcgagaacatgctaaaaaagaccttgtcttgatcttcgacaaagactatcagacaaatccagaggtgtatgggcaattcctcaaagcggtcaatcaaggcatcaaggtcatcatgttcgatccgcagttcgctgctaaagacatcaacgcccaggtacaacatggaacaagtattccagacctacagaaatatcttgagaaacggactttctctgggctcggtgccaagctcgagcttacgaaagttagacgtccactcaagagaaaataatggcacgtaaacctcacaagtcgccaaagacatcgcagcatgatccactcttcgacaacttcaacctcgaagcaaagggatcaggtactcaagccgaagcacgccttgactgggaggcaggaaagaatcttgtcctgaccggttatgcaggcacaggtaagacgtatcttgcgctcgccctagcactccaggccatgatggcaggagaggtccgacacattcacatcgtccgctccgcagtttcttcgcgagacattggtcaccttcctggtaccgaagcacagaaactcgaagtctacgaaagagctatcaagtcaaacttcaacaagatcttgaagcgtgctgatgcctacgaatgtctcaagctgaagggcgccgttagttttggatctacttcctttgaaaggggtgtgacatatgacaaaacctgtatcattgtagatgagtttcagaacgcctcattcgcagaacttgatacggtagtaacgcgtctaggtaatgactccagaatcatcttctgtggtgacactcgacagacagatttgtctcctggtaagagtggattccataggtttgttcgaatcgcagatgcttgcggaaagttcttcattcgccatgagtttggtatcgaagacatcgtaagaagcggtttggtcaaggcatggatcatcgcagccgaagatgatgcaatcaagaacaacccaacctgagaaatgaaatgattatcactgatgatgtaatgacctcgctgtccgataccgatctgtctgaaggcactacgagcgcagcgaacctgtatgctcaggcgctgtatcgtgatctggttcgtcaggcactcgctcgtaagagtaagcacaatactgctcgcgccctccgtggtcgtgctcgtattgccaagcgcaaggctaagcggaagtcgtaacatatgagcagcaagaaccgtcgtgacgaaaccaacgtcgaccacttcgcttctagtaaagaccgccgtgccgagaggaggtcgaaagatctcctccggcgggcgcatgatgtggatgaagactgggacgagtatgaactagactctcgcgagattcaccgcaaacgaaatcaacgaatggattaatcatgatcgttattgatatgtcgaaccttgtgttctcacaggttctcgacttccatcttaagaccaaagaacaggttgacatgcccgtcgtgcgcaatctgtgtatcgacaagatgaagtcgcacaaagcaaaactcggtaaggagttcggaccggagattgttctggcgttcgactctaagcattattggcgtaaagacatcttcccttactacaagggtaagcgaaagaagggtcgtgacgaatccacatttgattggaaatcgttcttcccaatgtatgatcagttcaagcaagagcttcgtgattacttccctgtgaagtgtctggaagttgaaggcgctgaggctgacgacctgatgggtgttcttggtcctcgttatgcgcctcacactccggtctgcctggtaacgtctgacggcgatatgatccagttgcagcatcagaactcgaacatcaagcagtggtcgccttggcacaagaagttcctcactccgaagaatgctgagtatgatctgtttgagcatatctgtcagggcgatgcgggcgacggtgtgccgaacattctgagcgatgacgacaccttcatggctgatccgaagaagcgccagaagcctcttcgcaaagaccgactcgcagagtggaagaagcacggcatcaccaatccagaatacttctgtccagattcggcagcgcttgatcgcttccaccgaaataggaagttgatcgaccttcggtgtattcctgctgacctaaccactaaaattgttgaatcctatgaggcggctgtgcctgcaacaggcaagatgttcggttacctcactacgatgaaactcacaaagatccttaaggaaggcggcttctaagatgccaatgtacgacttcaaatgtaagacgtgtgatcatgttcaaactgagatcatgtctattgcccggatggaatcaggcgaagaagccgtatgcaaagagtgcggtggggtgtctgcaaagaccttcaccgcaaccaattgggaagctgcatcggctgagtcacttggtcggaagaaggctcctgaggacttccgaaacttcttgacacagattaagaaggcacatccaggtagtactatcaaagatcattaatcatggctaagtctgcggacggaatgtggggctatagtacccgaaaagagacaaagcaatttcttgaaaagttcatggccaagaatcagtccgagactgataggtttattcatacatacacgtcactcctagatggtatgtatgatatcaaggagacgatcaagtctacgtcttacagtgaacctgaggaagtgaagttcatcacaggtaaagtcaagcaactccctgaccccgatgtgaactggggcttctcaactattggtgattcactttatgactgatctcattcaactgcgaaagctcgtcgcagaatacaaggctgatcacaagccgctcgaacgataccctggtgtaactcgtgtcctcagtggcaccaaagacatgacagggcttgatgcatggcgtgatcgaattggtcatgaagaggctgatcgaatcgttgccgagtccaagatgattggttcctcactcgacaagatcttcaacgattcgcttgagtcggtcatcaatcaggtaccatttgaagaatccctttatgagaacgaggcaggctataaactgtttggacagttgaagccctacttgaagagaaccgagccggtagctgtccagcttaaggtctggtctgatcacatgaagatgatgggttacctggattgcctgggtctttatgatggtgtccttactctgattgattgtaagaactccaagaaggaaaagcgagaggaatacctcgaggactactacctccagtgtactgcctattcgatgatgctgtatgatatgcttggcctaaagatcaagcagatggcacttttcattgctcgacgcgattcaccattcccgcagatcgtcatcagagacatcaagccgtttgtaccgatggtgttgggtcgagtaagaaattactatgggaaccttgcacaatgaaaatcaaaggcactaagatcgaaacagtcgatgttgatatcgatcctttggaagtgatcaagacttgctacaaaaggtggaagagtactactcctggcgagttcatcaggaatggtaattggtatgtcgaggtgcacacctcacattcgtatgatgaattggttggtccagtgtctgatcaagacatggaaatctacaaggcattccagatcgtctcagaattaatctcaggaatgaaatgaattacagtgaaaagatcctcgaggaactgacgctaagagcaaggcgagacaacatcggcttgttcgaggcagcatcagactactgcgaggaacatgatttggaacaagccgagttcgttgaaacactcgaccctatcatcatccaacgtctcaaagaagacgcagcccgtgaacgtaaagtcagaagatgcgtgcagaaaccgtccaaaactcttttctgagtgcaccactcagaacattccaagattatgtcgggctcaagctacacttcaacggtgacttagtatggaagcgccacatggtgctttcgcttcgtgaggagcagctgctcaaacgaaaggacgcatactatttcatccagttggctgagcagcatgatcgcgaaaagatcatccaaatgatgatctcgatgttcaagcgaaagcgtgactcttggattggtgagattctcgaggaggagaacgtcgagtatcacaagaagcggatggctgtaatcaactcgttgaagtacgttattcgtaccgacattgaacgcatcgtgttgttcatggaggacaataagatagatgttcgtaaactccttttgtcggacggtcaaagtccgtatattgtatcacaccagtcggacattattggtggtgtgaccgacgaaacactcgccctgttagagagggcgttcaagttttgctcacaggacacgttggaccctctttgggaagagcgcaagttcatgctgggtaaatacagtagctggattgaggtggacggagacttcctgaaacaacaactcaaccggctagtagaggcgaagtaagtccataagagacagtaagacctcaattcaaatagagaaaacggagactaaagatgtcatttgcagcacttaagaagcagcgtggtaatttcgccgacctcagcaagaagcttgctgatgaaaagaagggcggtggtggtaacggtccagatgagcgctattggaagctcacgaccgacgaagctggtaatggttacgccgtgatccgattcctcactgcaccagtgaacgaggaatacccattcgtcaagatgtactctcacgcgttcaagaacgatcgtaccggtaagtggtacatcgagaactgccgctcgaccatcaatgaagccgacccggttatggaagtcaattccgaactgtggaactcgggcattgaggcgaacaaggatctcgctcgtaagcagaagcgcaatctgaagtacatctcgaacattctggtcatcaaggactcgaagaacccgcagaacgaaggcaaggtcttcctgttcgcatacggttcgaagatcttcgaaatgatcgaagctgctctgcagccgaagttcgaggacgagaagccgttcaatccgttcgacttctgggatggtgctgacttcaacctgaaggcatacaacggttccaacaagcagcgttcgtacgataagtcgggcttctcggcaccggcacctctgttcggaggcgacgacgcagcactggaaaccctgtggaacaagcagtacagcctgcaggcagaagttgctcctgagaagttcaagtcgtacgatcagctcaagacccgtctacaggcggttctgggcaacgctccaggtggacgtcctgcatcgcaggcaacgagccaggcacaggctgtggaacgtgaattcgcagaaccggcacgtccggcaactcgtcaggagccagcagcatcggcaagtgacaacgaggacctgtcgcagtatgcagcgctcctggaaggcttcgacagttaaggtcgaaaccatagtttgattaaataaaggaacggcgcaggtcgttcctttatttttagctgacaagaatatgatcctacaagagaacagcttttattcagaccaatctggtctcgctacgttgctcacaaacaagcaactcgtagccgatattttctatatcaacttcctcgggtttgctggactccttaagatcaaggacgctcctgcgctgatgacctatgtcaagggtttgggtaagctccagctttccaacatgacagacaccaatgctgattggagcctggctatcaagctggcacatgatgcaggtatcatcaacatggtcgctgccaacatggcaacgaagttccttgcactggtcaagagcggaaagattcgctcagctgaccttaaggacgatccaatccgagatatcatcaaggcttgccgtgtaatcagcaacaagccttcaccccgtatctatcaggctgttcaagactttgttgatgcaaaggaccagctagagacgacaaccgtcaagctctggaagctgtctgcacgtccagagctaatgaccgctgctaaggaattccgtgaacagatcaccctgggtggctattcgtccgcattcctgaaacaccagtgggcaaatggaactgcaacgacgcctgctccagctgtagctgttcagcagccaccagcaaagggccagcgtggttcgttgccacctcagggtgctgcacatggttccgactcggattacatggctgctcttctccatgtgttcaagctcaaaggtggtattcacagctacctggaacgtttcggcttcaagggtcactttgacgttgatcgtttcaagaaggctgtcgcatctcctgagttcgttctatctcatggctatcacgtgccttgggagcagcatccgtttgtccagtggattcgtaagaaggatccttcggcttcggcagctgtgctcaagatcctcaatgacaaggatcgtcagacaggtgcaatcgctgtagcaactcaggtatcgaatactgcacctcaggcacctaagccagctgctgtaatccagactgtcgttgcaaatcgccaagagccgattgtgactaatgagtctatctctgagatgtacctcaacggttttgatcctaagcttcatgcgttgatgatgaagtatcattggcctaagggcgaagaagcgaacatcatcaagtcgaatcttcctaaggttctgaacgccctcaagacattcgaggttgatgagcttaagaagcctcatggtcgaattgaacagagcgaatatacgcagagcacctttgcgcgtatgcttcttggtaacggcgtgatgccatcccagatcaacggacctatctacaacactctgttgaagtcgggcgagagaaaggacgctgatgctgtattcaatcttctgatcgattacaacaacgcatccactttgaagcagaacgcgtttggtggcgacttcggtaatgacccagttacgactgcggtgtcccgcctgtttgatggtgatggtgttgatttcattcttgatcacctgtcacagatcaacagcgtaggattccagccaatcgtctatgatgcaggtaagcatctttggatcggaaacgatgccgaaacagagatgatccgtaacctgatccaatgcttgatgttgcctacgtcaaccctggacggaattgttcgcaacatcgaggcaacgtttgctcgtcttgatatcagaactggtcgaaccatcggaaagaaccttgcagttgacaaggaatccttcgataacaaggcgtctgcaaaggtcaagaagctcgtcgatgcagtgaataaggaaggttacgttgatatttccctgaagaaattcgaaggtgatacgatggagatcctcgacctcctgacagtagctaagaaggtcacgcagggtgcttcctatgcaatgtctgatcactttgtttctctgttgggcgatgcaatggctggcaagtttgatatcacgccagtgatcaaggacgaggaagacctgttccttatcttcaaggcattgcagcaagcagcattctacatgaatgcaacatcccgtgctacggctggaactatcatgccttggctgtatgagaagatggcagctgttggatctttgaactggaagatgaacagagcgcctaacccatatggtgagtatcctttcccacaggctactaactatttcaagtatctgctcgaaaagggacacaccacagcggcacgccatgttgctccatggatgatctactacggaacaggtagcgatatcttcaagatgatcattgcgcagttccctgagctgaaggaagaagtcttcaagcgttctggacagatcggtcatggcggtacgacatttgctgcgattcttgatcaaaagtttgatcctgttgctatgccttatatcagcctcgacgcgctgacctcatttgttcgttcgattgcaatgcacggatcaattgaagatgctgtcaaggctgcgcgctgggcaagagaaaagatcatgaaggaacaacctgatcgtaagccttgggaacaagctagtccttctatggtaggtcttctgggaactgcttggttcgttgagccaagcgatcctcactatgatgatgcgctcaaggtggcttcaaagtggctgatctctactctcaagcaacaatatagcgaaagtgacatcaaactgttccaagcctacaacccagagttctggaaggtatggatttcagaaaagaagaagggcgctgagaatagtcctcacgctacaacctcactccgtggtatgatggacacttctgagtattcggaactctacatcaactgcctgaaaggccagggtctagatgcaatcaaggcaaacctgattgactcgaccacaggttgggctgctcagttgatgcaggttgcggactcggatgacattacgattgacgccaagaaggagcttgttcgtagattcgctcctgcgatggaagttaacggcgttcacaccatccgagataagtcgcaccgtgactcgctcaacaagaactttgctgatgttctgctcgacgtctatgactcggataaggaccttgcagacaaaatctttgctgacctgccgcgaacaactcgtactctgatcgtaaagatgcagggtgagatggcttacatcgaagcaatcaaggacgacctctacaagcatcctatcaagcctgacttcccgcttgaccatgctcgtattcgtacgatcttgaagtacaacaacctagctatccgagtcacgtctaaccgaaacattgtccagaccatcggtgatattgattcggcagctaagtcttcgatcagcaaggctcttgtggacctcaaggtctccgaagtgaaacaggatgagacggcgcttgaactcgagacaattcgtctcaacaagttccgaaacaacaagcacggcgaagttgcattcaaggttctcaaatcgtttgacgttgcattcccaggcgcaagcaagagaattgccgaattccgaaagaacaatcctcaggatggtacgcttgatcctgtgttccacggaacaggtacaattgccgcttcgatggttctgcgtaacggattccagatcattcctgcaaacgactcctcagctgttggtcgtatgcttggtaacggtatctacttctccaatgtcatcgacaaggcacagcagtacgtcggcgacaagggtggtggcatcacgcgtagctatggtacacgtggttacatcttcgagatggaagccgaactaggaaagaaccctaaggactatcgttccgctggtctcggtcgcgactctatccgttctccggaatgggcagtgtttgatccggacaatcagcttcgtatctacaaggcatactacattgagcttgtaagcctcaatgcggttaaggcgatggctgcaaagcacaacaccaagttgaatgaatcggtaggtagctcatttgaagattacatgatggagaaaactgtggatacaaaggcaacatcgaagttctggttcatgggcgattcgttgcccaagtcgatgacggaaacttgcgaagtcagcgagttcaagtcgaagcgaaacgtctacacagaaccatcgtgggacggcggtacgatcgtttctatcgaacattcgctagacattgagccggtaacgatttcgattgatgacacggcgaagtggctgttcaacaagccagatgaagctaagttgttcttcgatctgatgaactgatctactaccaataatagctgggctcggaagggtccagctattatactatacgcacatcctatgagagaccccgcatgagcgacgcaccatttcatctatccattgataccgaaaccctcggtatgcgtgaaaacacggttgttctgtccatcggtgtagcagcattccagctggtgccaggtgcgaagaacgactatgacaagatcatccgtgacggcttccatgtgaagttcaatgtcaaggaacagattgtcaattacaagcgcaccactgaccagagcaccattgattggtggaaaactcaggaacctgcagcgcagaagattctcaagccttcagaagaagatgttgacatggcttctggtctgacaatgctcaatgactggatcaagcgttcggggtatcgctggaaagattcatttgtctggtcgagaggtacatactttgacttcccgaagctcgaacacatgtatctgcaagcgggcgtgaagtgcggcttcaacacctggaagattcgtgacacgcgcacgatgattgacgttctgactggctcagaaaacggacagtacgaaccagcaggtggcttcccgagaaacttcttgaagcacgacgcactgcatgacgctgcaatggacgcctaccgcatggttgagatcttcaatcttgctgcaggcggcgaaccggacgatggtccgccctggaaggaataaaatgagactctacctgatcgtaaaccgctatagcatgagtgtccaggcaggcattcaggggatgcacgtcatccccgagctgtacgaaaagttcttgacccctaagtggaatcgcgcctacctgtctaatctttctgactgggctcgcaaccacaagaccatcatgctgctgcgcactttcggcggtgacgaaagtatcgaagagctttacgaaaagattgcaccgcctgcgaaaggtttgcaaatgccgttcgctctgttccgtgaaggtgcgatgcgaaactgtgcaactgctgtgggcgttgtagttccgacggcgtactacagcaatcctatcgaagaactttctggcgacctgctgactctccgcgaaactttgagtcctttcccgttcgccatctaagattgttctttctttgtcatcgtttaaactgtgaacacatcaactaaaggaacaccgaagtgagcttgtcctacacccacagcgaacgcactgtcaagaagtacaccgtcaatcaggcatgcacctcggcgcgttatcgcctcgagaagagtggcctgaccagcctgtgcaccaattcgatcagcggtcgttcgggtagtgagctgatcactctcgaagagctgaacaagatcgctgacgccatcgtcgacgacaccttcctgtacgatggccacaaggcccgtcgccggtgataggaatgggtatggaagtctacttccgtagctttgtcttcgataccctcgctccttacttcgacaagtacaagggaatcaagttcaaggttgtgcgaatcgttgaaggttcgcacatccagcttgaagccattgacagcgatgtcaaggttgagggtctcgtccacgcagactatctgaaaagagcatgacccaggatatctacaagcaacttcgtgacctcgccggaaagatggatgtgaccatcatcactgccaaggctccgccccgttgggaaccggaccttcagggcggtgttcgtatcgtcgattatctcgacatcttgaagcctttgggtggtcttcgccggggtgaactcactgtgatcagcgcaaggacgtctgccggcaagtctcttttgtcggaggcttcctgtggcgctcgctaattacgatctgttcctcgatgacgagcgtgacccagctgggtctcttgaacatgctgaggtggctcgcaactactgggagttcgtagagataatcgaagagctgggcattccgaggcacgttgcctttgatcatgatatcggcgatgattactacaacggtaagaaatgcgctgagtatctggcagaacgattctacgaacaaccgtgggacgcaaagtacttcacctacagcattcattcccagaatcctgtaggtgcagagaacattcgcgccttcctcgaaaacatgaaaaggcatttcgctgatggataagaatgattggcaggcttctgcaaagtcaaagaagcatcttcgtaattgcatggcatacgagttgagtcgtgcaggtggcaatgtcatcttccgattccatttctccagacaccatgtcttccgtatcccggaaacagaatgggaagaactacctaatggttaagcacctcttcaatcctgaaaacgagagatacacgactgaggcgcttgccctttctgaggaagtctttgaggcgatcaaaccgatcgtcgacaggtatgctgaccaagggtatagcgtgcgagacattgcttctattgtccattccgaagtcgatatcgctacgattctgagaatcatctgatgaacccaaccaaacaaatcgcgcttgagttggaacaggcacgtcgagaattccttgatgagccgtttactgccaagtggccagaaggccttgagcaggaacaaatctatcaactcgactgtgacgataagggtcgcagtggcgcgaattggttgaaggtctacaccgccggcgatggcgatgtgcatttgatgatgcaagactgggaagagtatcccgagtttcaacctgagttcatgccttcgctgcgttgtcgaacctatatcggtggaggtcggaattggcgtacccaccaggcattgctctggcttgcccaggcaattagactagacaacatagagaataggcgcaaccatgtttaagattttcaatggtacggtcaaccgtacacacttcggtgccttctacgggatcatggtgacccatgcttcgcagtggaacatcgacgaaggaactgacctcattcgttttgaggtttcggtactagatgacaaggctgacagtttccgagatcagctgtgtagactagtcccatgcgtagagttcgataaggagcctacggcttgggaaatgctaatcaattttttcaccaaaaagaaaggtaacgcctgtgaccaatgctgctgataatgctgtcgagtaccccgttctgaacgatccgaagatcctggccaaggtgaagggtgtctgtcaggacattagcaatgtgatgaccatgatcgaagcttcgcgctcgaccatcaaggctcacatcgacaacctggcggaagagatcgacattccgaagaagctgatccgacagatgagccgtacctatcatcgtcagacctttgaaaccgaagtacaggaaaaggacgctttcgagcagacctatggaaaagtcttcggcttcgacaacgactgagaacgaaatgttgcgcctcatcaacgagctttatgaggcgctcgatttcgatgctgagcactgtgactttggtcctgcctacggcatgtgggaaacgcgtcgtcgaaaggctatgcaggaagcacgtcgcctgttaaaatcaaaaaacttcaagcggagttgattatggctattctcgcagttctcctcggtattgtcattgtcggtggcacgttcatcctgctcgccgatatcttcatcattcgtcctctcgagggatacagaaaggatcggtggtacgaccggttcgtcatgtaaagaactcctgtggtggttgggcacgagacccctagaaataggggttcttgtgtgataggctagtaagtgtctgattcttggtgccacacagatacgtaagtgtctgattcctaaggttgtcctgcacatagaaagaaactaatatgtggctgtaggcaataccaaccaaggaatgcagaaatgacggaagaaaagacgtatcgggttcgcagtcgtgtcctggctcttcctaaaggagccgacaaggcgaaacagctggagtatgcgctcaagcgacgtcgtcggcagaaaaagtcttggcctcagcctgaagatgcaatgctgattctccctctgcacttcaacgtctattcgttcagtcgtcagagcttccacgccgaagcctgcatggaaattccgaccaagaaaggtttcgagtatttcactgtcagcggtggcggcaggacacagtttgctgcactgaggcaggtcattgaaaagatcgaggcgtcagactggttccatcagatgaaggaacagaaagtctacttcaagatcactggcggcggtatggaggaaatctaccgaggttacctctgatctagtatcgtagttcatttgtagatgccaaccaagtctttaaaataacggatgtagtaaacacattcctgtggacattcgttatgacagaacagacaaagacaaagcgcaaatacaccaagaccttgaagtgggaagtgaacaacgagcaattctctgggttgacccaggcactcaatcgagtgaatgaactgctcaagactggtgcttcggaagacgtccgaatcaaacgcatcaagccagcaatcacgttctaaaggacacgggcgagagatcgccccttccttttgtcagaaattcaagctaggagttaatcatggcaactcacgttcgtattgactacgacgaacatcgttacgttacgcgtgctggatcaccggatgatcgctgggatcgcgacgatactgctgcagacatttccatcaacggcattgaaatcgtttctgaggcgcggtaccgcgaccttaccgttcccttcgatgtagacatcaacaagtcctacattctgctttgggcggattacaacaccggcgatagctttggacacgacagaaactacgtcgag

SEQ ID NO: 12 - DNA, 63753 bp, unidentified
  misc_feature 1..63753: note = the genomic sequence of a bacteriophage
  source 1..63753: mol_type = unassigned DNA
gcgggctgggccaggctgttcggcgccgagccccgcctcgtcctgcaggtggaggtcgacgtgcccgacggcccgcccgacgccaacggcctgccccagtggctcgccacccgcacctgggtcgacgcccgggtccagcaccttcccatcatcccgctcgacgtagcctgaggcccccatggacatccagcaagccgaccacttccccgacccgatcgaccgcgcctcggccgagtccctggcccacgacgaggcctccatagacgctgcccgcagggcggccgaggcccgcaacaggcggtgggcgccccgggaggacggcgactgcgcctgcgggtgcggcaacgaggtcgacccgcgcaggctggccctgggctacggcctgaccatcgagtgcgccaccaggatggagcgccgctgacatggagaccccgaccaaggagcagaccgatgccctcctggcggaccagctgcgcgaggtccgggtcgcctgggcccggcgccgcgaggccgagtcccagctgagccgcctcgccaagtacaagaccatgaccccgggcatgagggacgaccacaagcgctggctcaagcagctcatgtccgccaacaccgtcatagaccgcatcctgggagcgtgaaccgtggccgaggtcaccaacatttccaagcgccgcatggagcgggacgtctactcccgcgaccccgacgtctacctggaggcctggctcgacgaccggggcgagatcctggcgacccaggtcaggggcaccgaccgcgcgcccgccgagaccgggcgccaggcccacgacctggcggacaccctcctgggcatgtcctcccagggcgcgtccatcctgggcgaccagaactgggaggcggagccggtcttcgcggcccacctcctgcgcggcggctacatgatgacccgcgccaggcgcttctggaggaccgaggccagggagcccctgggcaagcgcctcaagtgcgcctggtgggtcgcacggaacgcctggcgggccctggggaccgtcctggcggcctgctactgcctggtcctgcaccccgacagggccttcccggccgacgaggaggactgatggcataccagccaccccactggcgccgcaagaagaccccgcagcaggccgcccaggagggcccacggaccaaggcctggatcccccaggccggcagccaggtcctcttcctgacctgcccggtcttcgagtgcctgttcgagggcacccgcggcccgggcaagaccgacgccctcctggcggacttctgccagcacgtgggccagggctacggcgccgcctggcgcggcgtcctgttccgcgccacgtacaagcagctctccgacgtggtcgccaagagcaaggcctggttcaagctctggttcccgggcgccaagttcaacgagagcgactacgtgtggaccttccccgacggcgagcagctcctgctgcgccacatggcgaaggtcgacgactacgacaactaccacggccacgcctacccgtggatcggctgggaggagctcaccaactgggccacctccgagatgtacctcaagatgttctcctgctgccgctcgacggtgccgggcatgccccgcaaggtgcgcgccacgaccaacccgtacggcaaggggcacaactgggtcaagctgcggttcaggctgcccggcatgcggggcaagatcatcaccaccccgggcgagcccgaccgcatcgccatccacggccacatcagcgagaaccgcatcctgctggacgcggaccccgagtacatcaaccgcatccgggcggcggcctcgaaccccggccagatcgcggcctggctcgacggcagctgggacatcacctccggcggcatgttcgacgacctgtggcggacgcagacccacgtcgtgcggcccttccaggtaccgcgcacctggacggtggacaggtccttcgactggggcagcagcaagcccttctcggtcggctggtgggcggagtcagacggcacggacctggtgttcccggacgggcgcaggatgcgcacggtcaggggcgacctgttccgcatcggcgagtggtacggcctcaagaagggcacggagaacgagggcctcaagatgctggccgcggacatcgccgagggcatccgcctgagggaggtgggcatgggcctcgccggccgggtcaagccgggccccgcggaccccgccatctggtccgaggagaacggcaactgcatcgagcgcgacatgcgggccaagggcatcaggtgggagcgggcggacaacgcgcgcaagcagggctgggagcagttccgtaagaggctgaagaactccctcaacctggacgagatggacgagcccaggcccaccgtgcgcgaggcgcccggcgtgttcgtggtgggcgagcgctgccccgacttcgtgcgcaccgtgccgcccatgccgcgggacgagaaggacccggacgacgtcgacaccgacgtcgaggaccacgccggcgacgactcccgctaccgcatcatgcacaagcggaaggccgtccggcagggcagcttctgaacgacggtgtgcgggccacggacggcccggcatcattaccccatcctccgacacgctgaccgacgagacagcgctaggctggcaccgagtaagaggcgacgcccacgatctagcggtccaggggctgaccatccgaaaggtccacgcagcaggatcaacctcccgtcacgtccccgcccggaggtccacccgagggcggggacaccatggtccaggtcgtctaatgtggattaggacacctcccggttaggtttgaagccgccaggaggagaagcaggcccgcaacctgcccaggacccacccaacagtctgtaccggcgagctcccttatgatgttcacaggagtgcacgcctgagcaggcccgccgacgacgacccactccccgggtaacggtcgcagagcctgcaggagccctagggagctccccggtgcagactggcaggacaggatcggcgggaccactccaccatgggggagtggagcaaactgtcgtccagcctggcgggctataagcgcctccgacccctgccagcaccctcgaagcccccgccgatcgggggcttcgccttttgtggagttcgatggcgttcggccacggctgggcccggtaaactgagctccctaccaaggagtccgaccatgaagaccttcgacccgggcgccatcgtgccctaccagatcctgcccatctccgaggaggaggccaccaagctggtggacgagcgcaaccaggcacgtcgcagccgcggcggcctgagcatgctggccgagaagcaggagatcttcctgcgggcggtggccagggagcgcgccgaccgggcgtggctcgaggccaacacccctatgggcaccgtgttcgacctgctgggagtgtcccacatggtggtcagcgtgccccactacatcagcaccgcggagagcccgagctggggtccgctgatggtgaacgtgatggcccccgacggccggggcggcatcgaccgctccatcctgagctgcgcccagctgcgcgccatgctcgagcccgggttcacgcggccgtgaccgcctactcctccgtccgcaagggcgtccgggcctggctcgaggccaacccgggcgagcactccatctcccacatcgcctcgcaggcgggcctcgaccgtgacgcggtcacggacgtcctgggcaagatgcgcagggcgggggaggcgtcctgcaggccccaggggcaccggaagctgtacaggctcatagagggctccgtggacacgtccaggaaggtgggcggccgggaccgcgaggccaagcgggagtacgacaggctctacttccagcgcaagagccaggagctgcgccggcagaggctctccaggctggcggacgaggcggcccctcagcccgagcagcccagggaggagcgcgccgagaccgtggccgagttcaggcgccgcggcggggagatcgagatgctctcggcccactgggactgaacgacggcccgcggccgacgcctcccgcggcatcatgcgcctaccgggtctggacagcccggtcatggtgattccatcggttgagttggaagggctgagagccccgatcccacaagggtcggggctttctttttcgccggctcgcgctacgagcgtgcgcgcgtcacgatgcgcgctcggcccgacgcccgggccaaggcccaaccaccggagtgaatccatgatcgaccctaagacggggattgtcctcgaccccgcgcgcgacgccctgctcaccgagttcggcaccgccaccctgtccaagcagtactgcctccccggcgagaccttccagcaggccttcgcccgcgcggccaaggccttcagcggcggcgacgacgccctggcccagcgcctgtacgactacgccagcaagcagtggttcatgttcgccaccccgctgctctccaacggcggcaccaaccgcggcctgcccatcagctgcttcctgaacgacgtcgacgactccatcgagggcctggtcgccaacttcggcgagaacgccctgctctcgaccaacggcggcggcatcggcaccaactggagccgcgtccgctcgatcggcgaggtgaccgccaagggcgtggacacccccggggcgatggccttcatgcacgtccaggactcgcaggccatagcctaccaccaggggcgcaccaggcgaggtgcccacgcggtctacctggacgtctcccaccccgagatcgtcgagttcatcaacatgcgatcgcccaccggcggcgacgtgcaccgcaagaacgagaacctccaccacggcgtgaacgtcaccgacgccttcatgcgggcggtggaggacaacggcccctggcagctggtcgacccgcactccggccgggtgaccgacacgatccaggcccgcagcctgtggatccagatgctccagcagcgcgcccgcctcggcgagccctacctgttcttcatcgacgccgccaaccgcgacctgcacccctccctgcgggccaagggtctccgggtcaaccactcgaacctgtgcaccgagatcaccctgccgaccacgccggaccgcacggccgtctgctgcctgtcctcgaccaacgtggcgaagcgcgacgagtggtgggacgtgcgggagcagttcatcggcgacctggtcaccatgctggacaatgccctggaggtcttcctggagcaggcgccccacggcatgtggcgcgcggtcgcctccgtgttcggagagcgctccatcggcctcggcaccctcggcttccacacctactgccaggaccagggctgggcgctggactcccacgaggccgcgaccttcaacgtcgtgctgtactccgagctgaaggcccacgccgtggccgcctccatgcgcctggccgccgagcgcggggagcccgaggacctggtcggcacggggatgcgcaacgcccacctcctggcgatcgcgccgaacgccaccagctccatcatctgcggcggcgtcagcccgagcaccgagccgatggtcgccaacgccttctcccagaagacgatggctggcacggggatcatgaagaaccccgcgctgcagcgccgcctcgccgcgctcggccacgacaccgacgacgtctggcgcagcgtcttcctcgagcgcggatcggtgcagcacctgccgttcctgtcggcctcggacaaggctctgttcgtgaccgcctcggagctcgacccgggcgtcctggtcgagctggccgcgcagcgtcagcccttcatctgccaggcccagagcctcaacatcttcctgccggcggacgtcgacacgaggaccatgcaccaggtccacatgcgcgcctggaagctgggcctgaagtccctctactacctgcgctccagctccgtcaaggccacctcggtcggcgtgatgccggagatcctgcgcgagcccgccccggcgccccaggccgaagagacggttgacctgcccgaggtgagcggcgcagcatgcaacctcaacggtgagtgcaccgcgtgtgaaggctgaggaacaacccatgatgatcgacaacagtccgtccctcttctcgaagagagcggagtacaagcccttctggtacccctgggcgtacgaggccttcgtggcctcggagcagatgcactggctggtgcgcgaggtgcccatgacgcaggacgtcaagacctggcgcgccgacctgaccgaccgggagcgccacctgctgacccacatcttccgcttcttcacccaggcggacgtggacgtggcctccggctacatcgaccggtacctgccgacgttcaagcccaccgagatccgcatggcgatggcctcgatcgccgcccgcgagggcgtgcacatccaggcctactccaccctgatcgacgagctgggcatccctgaggtggagtactccgccttcatgggctacaaggagatgctggacaagcacgagtacctgttccagcgccgggacggcctggagggcctggcgctggacatcgcggtcttctcggccttcggggaggggctgcagctcttctccagcttcatcatgctgctcaacttcacccggttcggcaagatgacgggcatgggccaggtggtgagctggtccatccgggacgagaccctgcacgtcgagttcatgatgaaggtgtaccaccagctgctggccgagcatccccacctccgcacggcagagcactccgagcgcatcagggagatcgcccagaagatggtggagctggagttcgccttcatcgacctggcctacgagtccggcgagaaccagggcctctccgccgaggacgtcaagcagtacatccgctacaccgcggaccagcgccttgcccagctcggcgagcgcgccctgttcggcgtcagcaagaaccccctgggctgggtcgacgccatcgtcttcgggaaggagcacaccaacttcttcgagaacagggcgacggactactccaagggcgccgtgacgggcagctgggacgacgccttcggctgaccagcgccccaaactaggaacagcggcatctccagaggaggggcggcggtacactgtgaccgtcgcccctcttttactatccgggcctggcggcacccggtcaggagataccagtgaaccacatgcagcagaccaccgggtccgaggcccggcgcgaccggccctacgagatgggccacgcccgcgtacctaccttcgccaagcgcttcgacgacgtgccccaggcgatgcacgcggccctcgagaaggcccagctgaacgtcgtgccgaacgccttccgggtgaacgtcgggcgcgacctgttcgacctctacctggagcagttcgacccgctggaccgccagtaccacgactgcaactgctgccgctcgttcgtgcaccgctacggcagcctggtcaccctgacctcggacggccggaccaagtcggtcctgtgggatgagaccctgctgggctcccgtcacccctaccgcaaggtcgtcaaggccctgcgcgaggccgtcgagcgcggccacgtggtggaccagttcttctgggacggccgggccgactggggagtccgcgagcagggcggctggtcccacctgtggaccaaccccggcgtgcactcccacacctccggctccaaggacgcctcccaggtggcggccgagcagcgcgagaaccggaagcacctgcacttcgccctccgggagttcaccctgggcgacctggagcgcgcccgggacatgctgatgacgggcggcctcaaccaggccgacaagacggtcaagatggcggagttcctgatcgaggcgaagagggccatggcccacctctccggcgaggccgtcaaccgccgcctgtggttccgcgtcgccatggccggcaaggggtggtgcaccccgcgctcctcgctgctcggcgccctgatcgacgacatccgctccggcgcctccgtcgagtccatccgccgcaaccacaacaagcgcgcggacccgctgacctaccagcgcgcccaggcggcgccgaccgccggcaacgtggcgcaggccgagcgcctgtttgagcgcatggggctcgcccggtcgctcgagcggcgccccgctcgggccgacgaggtcgtgttcgagtggcagccgcagccgcccaagaagaaccaggcgggcggggtgttcggccacctgctgcagcacgagcggctgtccaccgagcgggcgctgctcaacacccgcgccgagcgggtgacctacgccaggttcgctagggacgtcctgccgcgcgccctggagatcgaggtcgtggtgccccaccagggcaacttctgcgcgatcacgactgccgtccaccccgacgcgccgccgatcctgcagtgggactccgtggagtgccgcaacccgttcgcctggtacgtctaccaccagggctcgccggcgtccaactggggcctccgcccgggccgcgccaaggtggtcgggatcacgaagcagccctcccagtggggcggcgggttcgcccaccacggcaactcggtggtgctcatgatcgagggcgcggccgaccagcgccaggcctcgctcgccctgttccccgagtgcctgcgctcggagctgcacgaggtgcgcgccaccctggaggcccactcccgctcggcacgcctggagcgcctgccgcgcggcgtccagcacgcctccggcctgaggctggacgacaagaccccgctggaggtgctggtccgcaccgagggcggcgtggcgaggtacgtcctggaccgcatggactgatggtacgcggttgactggggagggggccatgataggctcctcccctctctattacccaaggagaacaccgatggacttctcaccacccaacttctggctcaccctggcgatcgtgctgttcgccatctcgctcgcctggctggcacggtcgatccggcggcccggcaacatgtaccgcgccggcatcgagtacgcgctggcggagctgcacctggcggaggacgccgaggaggcggccgaccggctgtgggagcggagcgcctccgccttcgaggagcccgagggcgcgctcgagttcgaccgcggcatccgcgagggcatccgcctgtactgcagggcggacgagaccggcatccgcgagctggaggagctgcgctccgagctgacccgcatggtagccgaaggcgatgccagcggctccgaggtcaacgtggccctcgacgtgatcgaccggcgcctcggcgtcggaatgtacctgacccaagcgggcgaggaagccctggagcaagcccgtgaacagtaagcccctctacatcttcgacctggacggcacactggcgaccatcgaccaccgccggcacctcgtcgagtccgaccccaagcagtggcgggagttctacgccgcctgcgaccgcgacaccccgtgccaggcggtcatcaggaccgccaacgccctgcacctggcgggcgccgacgtgtgggtgtggtccggccgctccgacgaggtggcggacaagacctccgcctggctgctgaagcacctgccgtggctgcgggagcacgacccgttcatgggcatggccctgcggatgcggttcgcccacgatcaccagccggacgtgaagctcaagcgcctgtggctctcccagctgcacccggacgaccgtgccaggctcgtggccgtgttcgacgaccggaagtcggtggtggacatgtggcgggccgagggcgtgccctgcttccaggtcgcgccgggggacttctgatgagcttccgacccatgctggcggcgtccatcgacgacgtcctcaagctgcgcttcccgctgcagacctccccgaagctggacggcatccgctgcatcgtgcgggactccgtcgcggtgagccgcagcctcaagcccatccccaaccgccacgtgcaggccgtgctcggccagccgatgtacaacggcctggacggggagctgatcgtcggcgacccggcggacaggatggccttcaacaacacgacccgcggggtcatgtcgatcgccggggagcccgacttccgcttccacgtcttcgacgacgtgacgcaccccgagatgggcttcaacaagcgccacgacgaggccggccggcgcgtgatggcgctcggccggccgtgcgtcatcgtgccgcactgggaggtcaacaccccggaggagctggtgtcggtcgagacgtccgtgcttggcgaggggtacgagggcctcatggcccgggacgcctgctcgccctacaagttcggccgcggcaccctgagggcgcaggacctgctgaagctgaagcgcttcgaggacggcgaggccgagctgctccgcatggaggagctgatgcacaacgccaacgaggccagcacgagtgccctcggcctgacggagcgcggccacagcaaggagaacctcctgggcatgggcaccatgggcgccctcgtcgtgcgggccgtcaacgggccgttcaagggcgtcgagttctccatcggcacgggcttcaccgccgaccagcgccaggacctgtggagccgccggcacgacgggctcgtcggccgcctcgtgaagtacaagttcttcccgggcggcagcaaggacgcgccgcgcttccctgtgttcctgggcttcaggagctcggccgacatgtgacgggcggaggctgctggctcacaaccagcagcctcccgggctaccatcgcgagcatcagctcacaactagcccaaggagcccgcgatggccgacggacccaagaagaagcccacggtcgccacgccgtccggggcctacctgcgcatgcagcccctgtggaagatgatcgacgccctcctgggcggcacgaccacgatgcgcgctgccgggaaggagtaccttccccagtacgacaacgagaccaacgcgaactacgagtcccgcctcgagcgggccgtcctgctcaacatgacggagcagaccctggacaccctggccggcaagccgttccgggagcagatcgtcctgggcgaggacgtcgacgccgacttcgaggagctgtccgaggacatcgacatgcagggcaccaacctgcagtcgttctgccgggcctggttccgcgagggctgggccaagggcttctcccacgtcctggtggaccaccccacccccgaggagaaggtcgacgctgccggcgtggcggtcgcccggaccctggccgatgacagggccgagggcatgcgcccgtactgggtgcacatcaagcccgagtgcctcatcgccgcctacgccatgatggtcaacggcaaggaggtgctgacccacgtccgcatcaaggagaccaccgtcgagcgggtcggctgggaggaggtcgagatcgagcgggtccgcgtcctggagcccggcatctggcaggtatggaagctggtcgacgagaagaaggacgagtgggccatcgagagcgagggcaccacgaccctggacttcatccccctcgtgacgttctacgcaggcaagcgcgtcgggctgatggacgccaagcccccgctgatcgacctggcccacctgaacgtcgagcactggcagtccaagagcgaccagcgcaacgtcctcaccgtgtcgcgcttccccatcctggcggccgcgggcgtgcccgccgagcagaaggtcaccatcggccccaacaacttcctcaccaccgaggacgtgcagggcaagtggtactacgtcgagcacacgggggcggccatcgcggcgggccagaccgacctggaggccctggaggaccagatggccacctacggggccgagtacatgcgcaagcagccgggggacgagacggcgaccgggcgcgccctggactcggccgagagctcgtcctacctggcgtccaccgtgcacgacttccaggactgcgtcgagctggccatgaagtacacggccaactggcttggcaaggacgacggcggctcggtgcaggtcgactccgacgtggacctcggcgaggcggacgccgccgagctggacaccctgaacaaggcccgcgcgcagcgggacatctcccgcaagacctacctgggcgagctccagaagcgcggcatcctggcggacgacttcgacgaggagcaggacgccgagttcctcgaggaggaggccaagaacacgatgggcgacatgttcggcggcggcaacggcacgggcctaccgggccagcagcccccgggcaaccagccgcccggcaatcaggacccggcccaggtcgacccgcccaccccggatgacgagtgatgcccaagaccgctaacgaggagatcctcgacgcgaccgtacgccaccagatcaggctgctgcgcttctcccagggggaggcgcagaagtccgccgagctgctggcccagagcgacgccgagctggtcgccctgctacagtcgggcctcaccgacacctcggaggcccgcatcaggggcctcctgaccgaggtgcgccggatgcgcgccgcggtcgccgagcgcatccaggtggagctcgaggaggacatggagggcctctccaagaccgaggccgagtgggaggtctccatgctccagggggcgacgccgatcgccctctccttcaatgcggtgcccgccacggtcgtcaaggccgtcgcgggctctcccatcaatggcatcccgctccaggggtggctcgggaagatggcgaccaacgacgtcgcccgcatcgagcagcagatcaggctgggcgtcctccagggcgagaccatcgaccagatggtgcgccgcatcaggggcaccaaggccggcggctacaaggacggcgtgctggagaccacccgccgggaggcggagatgatcgcccgcacggcgaccaaccacgtctccaccgccgcgcgccaggcgacctgggatgccaacgccgacgtcataaagggcgtccggtgggtcgccaccctggacggccgcacctcccccgtctgccagagccgggacggcgaggtctacccgatcgacaagggcccgcgcccgccggcccacccgaactgccgctcgaccgttgcccccgtgctgcacggggaggagatcgtgggcgaccggcccacggtgaccgacacccgtacccgccgccagcgcgagatcgacttccgggcggaggccaaggaggccgccggcgacaagtggaagggcatgtccgcggccgagcgcaacgccgccatcaaggcccgccgcgacaagtgggccgacgagaacatcgggcagacccccacctcgacgaactaccagtcgtggctgaagggccagtccaaggagttccaggacgaggtcctgggcaagggcaaggcgcagctcttccgggacggcctgccgctggagaagttcgtcgacgagaagggcaagccctactccctggcggagctgaaggccgagctggagggcgacaagctgaacgtcatccagcccggcgtgggcctgaaggccaagtcgctgctgcagcagggcatgtcgccctccgaggtgctggaccagatcaagcaggagttcccggacgcgtccacctcggcggcgtccatcgcctcctacaagtccgagctgaacaaggccggcgcgctgaacctggggcccgcgtccaaggtgcccgccggcgccctcaagcaggccaaggcggtggccgacgtcgtcgccgacctggacgcctccctgccgccgaacctgaagcacgccgtcggcggccagtggtccaccgtcgtcgacgacctggacggatcgcccggcgcgtacgggtactaccaggccggcaagggagtggtactgagcgggaagaagctgtccgtcctgccggccgcgcaggccaagcaggtcgcggcccacgagctcggtcacctgctccacaagcagcacgacctgctgctcgacccggacgttctggcggccctgaaggcctcggcgaagggcctgtccccggacgcccggaagctctactcgtactacctgacgagcgccgacgagctcgtggctgaggtctacggccaggccctgagcccgagcgccgtgacgtcccagggcctctccgccatcgagttcaacaaggccttcggtcccgcgatccaggcggcgaaggacgcgatggcgaagaagttccccgtgcccccggccggcgccaaggtcccgctcccgggcggccccgccctgccgtacgaggtcgcgggcaagcacacctcggtcgggtcgctggccaaggcgctgctgcagcagggcatgccggacgaccaggtcctgaaggccgtcctcgccgagttcccggaggcgcagaccaagcaggcgtccatcgcctcgtacaagtcccagctgaagaaggacggtctgctgcccaacaaggcctccggcccggtcgtggcggccaagcccatcccggacgtcgtgcccgtgccctcgtccggcgccgcggctgtcgtggcgcccgaggcggcggcgacccagtctgcactgaccctcacctcggcgcagctgaaggacgaggccatcaagctgatgcagaagggcatgctctccaaccaggacctggcggagaccctggcgaagcagttccccgccaacgcggcggacgtcaaggtcaccaacatcgcgacctggaagtccaactggaagaagtcgagccctaactcctacaaccacgcggtctcactctccgagaaggcgacggtcaaggaggcggtgtcgggcccggtgcagaagccgaagctggcagaccagaagctcggcggcacgtccaccctcgccctggacaaagtgaagtccgtactggctgcgggcggcggtccgcaggacgcctacgaggccatgaagtcggtcttcggggtcatcaagcagcctggcgccgacgacctcctggagctggcacagtaccagctggcctcggccaaggccgcgggcaagccctacctgaacgcggccttcaccaagccgaccggcttcgtctccaacggcaagatcgagaagtttacggcccagctgccagccagtggtaaggccgccctggaggcgtacaagaaggcgaagcagcagggcctcggcccgatcaacaccaacaagctggtcaagaagatggcgggctacgagccctccgcaacaatgaaggtcaagctgaaggaggcggcggagtacgagctcaagaagcagggcacggccaccgtctccttcaacgaggcgaccgtcgccaagaagcagggcgtgaccccgaccgcggtggacatgacggcctcccggccggcctccaccccgcgcgacggcctcccgccgcctccgaggtactcgggggcccagcgcgcagcgggcgtgcgcaagtttgccaacgggctgccgaccggcgacctggcggcggtcaatgccaagcagcgatcgatgggactccaggagctaacggcggaggaagtcgcggcggtaaaggcctatactggaaacacctaccgggcgctgaacaacgcgctccgggcgggcaagtactcgtcggacccgcacctgcaggcctacgtggacgcagcccagcacggcatgtccaagatgccgaagttccagggcgtcagctcccgcggcatgacgttcaacgactcgcagctgaaggccatgctgtccacgtaccgcaagggcgccgtggtcgaggactccgccttcgtctcgtcgtcctacggcgagcaggcggcgttcagcggcaacgtgtacatgaggatcaacggcaagaccggcgtgaacgtctcccagtactcgtactacaagaccgagcgcgaggtgctgttcatgcccggcacccggttccgggtggacgacgtggtgcagcagaacggcaagtacatcatcacagtgacggaggtttgacatggcggacgagttcgaggcgggcccggagtgggaggggaagatggacttcgccccgggggtgcccgaggaccccgacgcggcgccggagctgttctaccaggtgctgctcggcagggtctacaccctgaccaggtggcgggacgggtccacgggccggggcgaggtgcagctggccgacctcgaggcgctcgccgggggcccgatcacccgggagggctggtacgacgccctggggaagtacctgggcgcggagctgcccggctccctgtaaaagaggcccgccgcaatggcgggctttctctttctgcttgaacgttggcttgcgtgggcccggcgccggcggtaaggtgccagcctatacaccccgggcgcgacgcccaacagccagcgcgtgatgcgcagaaggagataagatggacttcgagttcctgaagaaccccaccgtcgacagcatcgacaaggtcccggagcagttccgcggcttctacggagagggcgagggcggctacgtcctgcaggacagcttcaagggcaccgccaccgcggtggacggcctgaacaagtccctgaaggcggcccgccgcgacgccgacgaggccaagcgcaaccgcccggacgtctcgggcttcgcccagatcggccagctgctcggcatcgagggcgacgacgccatgaacgccgagaccctgcgcgcaggcgtcgagaagctgatctcggagtcgaaggacggcaaggtcaactgggacaagatgaagcagtccctggagagcggcttcaacaccaagctgcaggcgaaggacgccgagatccagggcatgggcaagtccctgcagaagtacctggtgacctccgccgcggtccaggcgatcgccgcccacaagggcgtgccggacctgctgctgccgcacatcaccgcccgcaccaaggtcgtcaaggacggcgaggactacgtggtccgcgtggtcgacgactcgggcgacccgcgcggcaacgcctcgggcggcttcatgacggtcgaggacctggtcaaggagctcaagggccaccagaccttcggccgggccttcgagagcgaggcgcccaacggcggcggcaagccgccgggctcgggcaacaaggcccccgtcggcaagccgggcgagctgaccgccaaccagaagatcgccgccggcctggcgaagcgccgccacggcggctgatccagcagttgtgcaacgagtaagggcgccccccgggcgcccttactctttacagcgacagcaccgtgaggctctcccgcaggtccgtcaggacctggccgagccagttggtgcctcgccactctttcgggtcgtggcagcggggatcccgctcgtccaggccgatgccccagatgacgtccgtcgggcttgcctcgaccaggagggtgccctccgtcaggaggagctgcgcccgcagcttagggttgctggtgaacttgtgcaggctggcccgcatcacgacgtcgcgggacaccgagtcccactggcggcggtcgaagcccctgacgcggcggccgatggccttctgctcggccgggctctgggtcgccatgatctcgtccagcgcctgctcgtcaccgaagaccctcgccttctgggccatcatgtactgctcggcgcagccgtactccacgccgtcgatcaccatgggcgacgggtaccactggctgaacaccccgccgtagaacagggtgtagcggtcgtatttctcttgcatgggaaaactccttgcggatcagggggttacagtgtaccgtcagactcgcttcgagaccgcgggcgggagcacgggctcgggggcctggtgcacggacaccgcctgcaggacgaagaagcgcgtccccgggtggaggttggcgaggcgcacggcctctccgtcggcggtggcgccgttgaagtggacggccttcggcgggttcttcagcgcaggccggccggccgcgcagccgtccttgtagacgtcgccggaggccaccatgtagaatcgcccgtcggtgatttccgaggttccgcggctggggttccaggccaggtcggcgcgcttacggccggtcgagcggcccacgacggagtcaacgacctgtcggcccttctccgtcaggctcgggggctgcttgccggtcgggtcgaagtcgatcaggtcgtccgccaccaggaacgtgatgtccggcgggggcaggccgcggacgtgctcggcgctagagaagcccatggcgatcgtcagcagggtgcgcaggcgggactctggcgaagtcggggtcatgcggggcttgggcttgggcggggcaggcttgggcgcctcgacgggctcgaagtcggaggccacgatcaggaggcgatccacgccgagctgctccaggcggcaggcgattgcgtgctcggtgcggccgtgcgccctcgacagcttggtcaggttgatcttgccggcggcggccacgaggaggtcgcgctcctcagcctccgtccacggggcaccgccgcgcggggccgccgtcgggtgggcggagttgcccaccagcgtcgaccagccgcgcttgacggcgatggcgtgggacggctggcggaagcgcgagacgatcagggagaacgcggcctcggcgaaggcgtcgaggtagtcgtcggggatcaggtacaggtcttcgaagtccatgggactctccttggttggtagggacacgggcatcatgacgcccaattaggtggtacaatgccactgtttaaggggtacggcgctcctgcatgaggaccttggcgcggtcccacgcactgttccacaggtcgcagacctcctgaggcatgccgtcgtcctcgtcctcgcggccgtaggtagacggatctacgccgagctccccgaaggcggcgtccatcaccatgttggaatcgcagaagtcccccgagtggcacacgtcggggttcagctccctggagttgaggtccacgacggtgtcatagacgtcctgcccgaggttcatcctcaggaggcgcacgaaggcttcggccagcgcctcgacggacggcagtccgccggagggctgagggtcgggcagggagtcgcaccggcagtctccgaagtcgaagccctgaccgcagacgttgcacgagaaggctgccatcacatctctcccatgaccttgaggaacgactctgcgccctcgaagatcatcttgtgcatgtccatgtcctccgcctcgatcatggcgttgtcgttgagggccacatcgacggtggtgaaggatgcctccgccgcctcgatggcgtcgagcgccgtggcgtaggccatgacggtgataggggcgatctcgaggtcgcgcagcagctgcatcacctgcgcgaggtcctcgacgggcgtgtcttccaggttcttgtacttgacggtcatcacaggttcctcagttcgtcggcttcggattcgacgccggacatgtcccacaggtgggtgcgcttgacgcggccgtcggcggtgatcgccatgatgggcgactcgtcgccgagggtggggtgctcgtacaggtccaccccgccggccgagccgaagtaggtggggttctttgccatgaaggcgatagccttctcggtggtgggcttgttccgggccatgtcgtttaccagtttgcgttggtgtgagtccattatacggggtctttcggtacatgggagccccctggaagaactatttttattctttttattagatataaagaaataagggtatctaaggcagtcttaccctccctctagggtagtctgacctctaagtccttgtcgcagctgtaccgtctagggcttctaggccttctagggctgttcgtcgagccgtggccggacctgaaacctggccgatttcctgggacaacgacgcgccgaaggctcgtttcggctcagatacggcttaagtccttggtccgtaaagctttttctcgtctgaggcaggcctccggaggcccaggaggctcagattctcgcgctggaccagcgttcagggggttacgagctcgggtcgtcacggcaaagtcccgaaccatagcacgcgagcacggtcataccctgccgcgctcgctgaccctgcagaggcgtgatgccttggcccaggggtcgaatcgtcgggcgatccggcacctttcccaagcatcccaccacccgcctcccaggagaaccctaatggcatccgttaccctcgccgagtcggcgaagctggcccaggacgagctcgtcgctggcgtcatcgagaacgtcatcaccgtcaacgagatcttcgagcagctgcccttcgacggcatcgacggcaacgccctcgcctacaaccgcgagaacgtgctgggcgacgtccagatggctggcgtcggctcgaccatcaccgccaagaacccggcgaccttcacccaggtgacctcgaccctgaccaccatcatcggcgacgccgaggtaaacggtctgatccaggccacccgctcgggcgacggcaacgaccagaccgccgtccaggtcgcctccaaggccaagtcggccggccgccagtaccagaaccagatggtgaacggcgacggcaccggcaacaacgtcgccggcctgttcagcctggtcgccggcagccagaccatcaccgccaacaacggcgcggcgaacggcgcgggcctgtccttcgaggacctggacgccctgatcgacctcgtcaccgacaaggacggccaggtcgactacctgatgatgcactcccgcacccgccgcaagtacctggcgctgctgcgcgccctgggcggcacctcgccgggcgacgtgtacacgatggcgtcgggccgcaccgtgccggcctaccgcggcatcccgatcttccgcaacgactggatcccgatcacccagacccagggcaccgccacgaacgccacctcggtgttcgccggcaccttcgacgacggcagccgcacccacggcatcgccggcctgaccgccgagaagcaggcgggcatgcacgtcaagtacgtgggcgagaaggaggatgccgacgagagcatcacccgtatctcctggtactgcggcctcgcgctgttcagcgagaagggcctggccgtgctgaagggcgtgaccccggcctaatccgccggcgtcgctgatctcggttagcccgccggcgcaatgccggcgggcgcttaatgggagacaggaaacatgagcgcacacctcgtacgcctgagcggctcgcgctgcgggcagaccctgtacgacaagtccgacgccgtcatcgtctgggtggcggacgactcgaccaccaagccggccgacgcccgcgctgcggcggccgccgctcgccccggcccggacggctactggagcgacgctgtcgtggtggagctgagcgaggccaacctcgccaccgccatcccgatgcggaccgtcaactgagcaccacgggccctgccggtacgccggcggggcttcgtggcctataggccaagagaaaggagtggacatcatgtccagcaagacccagcgcttcgtcctggtgggaccgcaccagggcaagaccatgaacgtcaacggtcacgagttcgtcgacggcgagtacgagttcgccggcaacgacgggcagatcgccagcctcacccgcgtcttcggcttctacggcgccctgccggccgagcaggccgagctgcaggagctgcgctccaagcagggcggcaagccgacccgcaagcagctggacgaggccatcgccgccctgccgggcgagaacaccgacgcggactacgtggtcggcgccatgcgctcccacttcggcgacctgttcacccagggcgacgagctgatggtgcgcgaggtcgtggtcgccccgtcgggcgatgcggaccaggcgaccgtgggccagaacaccaacacgcaggagccgcccgccccgccggcgctgccgagcctggctgaggcgatcggcctgctggacccggccgccgaccaggactggacgtccaacaacctgccgaacctcgagcgcctcgaggctctgaccggcaagaagccgtcccgcgccgacgtcgacgcgatcgccgacggctacacccgcgccaaggcgaaggccgccaaggcctaagcccctgacagacccacaggagaggatcgacccatggcattcaaccagcaggacaacgacggcacggtcgacggcgccaacgcctacaccgaccccgccaccgtgcgcgcctactgggcggaccgcggcgtcgacctctccgccaagacggacaccgagctcgagcaggcgatcgtgaacgcgacgacctacctcgacgcccggtactcttgggtgggctggcagcgacgccggctccagggcacccagtggccccggggcggcgtcacctcattcctccgcggcctgccgcccgccctcacggtggcggtctgcatggtcgcgaaccgcgccctctcgggcaagccgctcatgccggaccccacgttcgacgcgagcggccagaaggtcacccaggtgacgaagaaggtcggtccgatcgagctctcgaccacgttcgccgagagctccggggccaacctggcggccgcgacgccgcagttcccggaggtcaccatgacgctgcagcaggccggcctcgtcgagtccggcaactccggccaactgtcgaggggctgacatggcgaccttcgactaccagtccatgaaggacgacgtcgacgcgctgctggccgagttcggccagtcctgcaggctccgtcgtccgggcggcccggtcgttgttgacccggtcgacggcaccgtcaccccgggctccggcccgaccgacttcccggtcgtcggcgtcataaccgactacagcgacaagcaggtcgacggcgagaacatccgccgcggcgaccggctggtctacatccaggcggtcgagcgcccgaagcagggcgacgtcttcctggaggaaagcggcacccagtgggccatcgtggacttcgactcggtcgatccggcgggcctggccctgctgttcgccctgcagctccggaggtaacgtggcgcgcttcgagcagcagctgaaggggttcggtgtcaagaccctgaagagggtggaccaggtgcgccgcgcctcggtcctcgagctcttcaagctggtgatcttcgcgacgccggtcgacaccggccggctgcgcggcaactggcagacgaccatcaactcaccgaactgggccgcgatcgaccggctcgacctgggaggcggcgcggccatgtcggaggccgtcgccaacctgggctcgctggtcgacgtggtctggttcacgaacaacctgccgtacgtcgagcggatcgagtacgacgggtggagcaagcaggcgccggagggcatggtgcgaaggcacgtggcctcctggaagcggatcgtggccgccaaggcccgggcattcggcaggtaaggacggacaatggctaccaacacctacagcgggctggacatggcgctgcgtcagggggtcaaggactccccgctcgccctgccctacgccgtgccgaacgccccgttcgacaagccgtcggaccagagtccctgggcctcggtcttcatcatgggcaaccagccctccgtcgccaccctgggcaacgagggccaggacgcccacgacggcatcctgcagatcgacctgaactacccactcaacaccggcgaggcggccgtgacggccaaggcggacgagctgactgactacttcaaggcgggcaagcgacttgcccactcgggggtcgagctcacggtggcctcgtgcggccgctcacgcgggcgcgaggtcgatggctggtaccgcgtgagcatgaccgtcacctggttcgcccgggtctctcgaaactaatccacagtaggagcgtaccaccatggcaaacggcagccgccactccatgcgctacgtcgccgagaccgtctacggtcagactccggcgacccccgcgttcaagcccatccgccacacgggcaccaccctcggcctgtccaaggagtccctgcagtccgaggagatccgcgacgaccgccagatcgccgacttccgccacggcgcacgccaggtgggcggggacatcaacttcgagctctcgttcggcagcttcgacgacctgctggaggccgtcaccctgggcacctgggtggcagacggcgccccgggcggcgacggcgaccgcctgaaggccggcacggtccgccgctccttcaccgtcgagcgcttcttcggtgacatcgcgacggccgacaagccgtaccaccgcttcaccggcgtcgagctgaacaccctggcgctggccatcagcgccaacgcgatgattaccggcaccttcggcacggtcggctcggacatgtccaccgcccaggccatcatcgccggcgcgacctacgccgcaccgacgaccacctcgccgctggactcgttcaccggtaccctgaacgagaacggcacgccgatcgccgtcatcaccgagatccagctgaacctggagaacggcctggaggcgcgcttcgtggtgggctccaagaagtcgatcctgccgtccatcggccggtcgaacgtgtcgggcaccatcacggcgtacttcgagaactccctgctgctggacaagttcatcaacgagaccgagtcctcgatcgtcttcgagctcccggacggcgcaggcaacaagtacgtcttcaccctgccccgcatcaagtacaacggcggccagccggacgtcgagggcgagggcccgatcaccctgagcatgccgttccaggccctcctggacagcgtgacccagtccaacatcatcatcgacaaggtgcccgcataagccatggaccagaacaataacaacgccgcgggggcggctggcatgaacgagttcttcacccgcggcaccgccaacgaggggatccaggtccccctgtggcgcccggacggcacgaagagcgagcactgggttcgcatccgcggcatcgactcggacgcgttccggcaggccgacgctgaggcccgccgggacgcgatccggatcgcccagctcgactcccaggtcgagcgggcggccgagatcgccaaggcgaagcgccgcctcaccgctcacctcgtggtcgcctggtcgttcgaccagccgtgcaccgtcgacaacgtggaggccttcttcgtcgaggcgccccagatcatggactccatcgacgtcgcggcgtccaagcgcgccctttttttcgcagccgggtcgagcagctcgcagccttcgcagagcacgagttcaagctcgacctgatcccgaagggaagtaagcagaccctgcgtgcgtccctcatgcaggtgtggaagacgctgaagcgcaagccgcctcagctggaggatgcgcccgagctcccggaggagctcgggtacatctgggagtggttccgtgaggtgttcgccggggtgccgctcaccttccaggagatgcaggcttggtcgcagatgaccggcaagcctctgctgggctgggaggcggacctcatcaagtccctcgaccgcattttctggaaggtgaacaaccgtggcaactgacgtcgccagtctggcaatcaagatcgagtcgctccaggtccagcaggccgaggggcgactcaagggcctgagctccgccggcggcggggccgagaaggccaccgcgggcctcatgggggccttcaccaagctgctggggccgctggccgcggccgtcagcgtaatgggcaccctgaacaagctggtggacgtgcagcgccagttcgacgtgctgaacgcgggcctcatcaccgccaccggctcctccgagaaggcggccatcgccttcgacgccctgcgcgagttcgcccagaacacgccctacgacctgaaccaggccgtcgacggcttcaccaagctggtgaacctgggcctcgatccgagcgagaaggcgctcatgtcgtacggcaacaccgccagtgcgatgggcaaggacctcaaccagatgatcgaggcggtggccgacgccgccaccggagagttcgagcgcctgaaggagttcggcatcaaggcgaagcagcagggtgaccaggtcaccctgaccttccggggcgtcgccaccaccatcggcaacaacgcggccgagatcgagaagtacctgacggacctgggcgagaacgagttcgccggcgcgatggagcgccgcatggactcgctcgacggcgccatggcgaacctgggcgacacctgggaccagctgtggctgaccatcagccagtccggcatcggcgacgccatcgaggcctccgtgcgcaccgcgaccgacgccctccaggagctgaccgacatgatcgcgtcaggccagatggaggcgctgctcaagtcgcagaccgtccagtgggaggtctggggcacggacatcgagaagtccatcgacatcgtcacccagttcatcaaggacaacttcggccagtgggaggacgagggcgagtccgtcgtcgacttcctcatcagcgccttcaaggagctgccctccaacctgcgcgcgatggtccagatcctgaccgtcgagttcgcctccggcatcgacaggatgatcgccggcgccgagttctggcgggacagcatcaaggccatcttcaccgacgacaccatcgccgcctcgatgaagcggttcgtggcggagcaggagcgcctctcccaggtccgcatggagtccatctccgcgatcctggacgagcgcgacgcgaccctcaagtccagcaacgagcagctggaggccgccaagcgcctgcgcgaggagtacgacaaggcccaggaggccaagaagaaggcggcggccggcacggaccgcctggcacagttccgcatcggcggcgaccgccagaagcccgcctcgtcgggcgtggacaaggccgcggccgccgaggccaagcgccgggagcaggagttcgcccggctcaaggagtccctgcagaccgaggaggaggccatccggtcctcctacgacaagcgcagggcgatcatcgaggccaacaccaaggcgggctccgacgagcgcaccaggctgatgagccgcctcgacgccgagcgcgacaccgagctgaagaagctgggtgcctacggcaactcggagctggagcagctgcgccagtcgctgctgaagcaggaggacgccatcagggagtcctacgaccggcgcatggagatggtgcgcgccaacaccgccgagggctccaaggcccgggcggagctggaggcgcaggtcgtcaaggaccgcgacaaggccctggccgacgccgagcggcagcgccagtccgagcgggacagcctatacaactccctcctgaccgaggaggaggcactcaagcagtcctacgagcggaagaagcagctgatcctggagagcgagtcggtgacggagctggagcggcaggacctgctgcgccgcctccagaagcagttcaccgaggagcaggcccagatggagacgcagcgcatccagacccagctgcagggcgcggccacgctgttcgacggcctcgctgggctggccaagggttacgctggcgagcagtccaaggcctacaaggtactattcgccgtgagcaaggccttcagcgtcgcccaggccgccatgtccatctcgaccggcctcgccaaggcccaggagctgggctttccggccaacctggcggagatggcccgggtcgcagccaccggcgcctcgatcatctcccagatcaacggggcgcagttcgccggcgcgtacgaccagggcggccagatcccggccggcaaggtcggcatcgtcggcgagtacggcccggagctggtgaagggccccgcctcggtgcgcggcagggagctgaccggccggtcatacccggacggcggcaaccagcccgcgcagatggcaccgcaggtgcacgtgaagaacgtgaacgtgctggacccgagcctggtgggcgactacctcggcacggacgagggggagaagctcatcatgaacgtcgtcaaccgcaacaagagctcgctgggctactaaccgaggagattcagatggccttcgcaacgggcacggccgccaaccacgtggacgcgctggacaagctgcgcctgttcctgaccgccaacgagagcctggtagccgccgggcagacctggcagcagctgcggtgggtccccgacaacctggactccgtggacacgaccctgccgttcagctcgggcgtttccctccatcgcatgttccggccggacttccggacccagaactacaacgacgacgccaacggtcagtacctgtcgtcgacgtcgttcaccccggaccagtacgtacgcctgaagatgcgcgcagcgcgggccgtgacgcggttcaccctcaaggccgggcagagctcgaacgtccgtaactacacgccgcgcaacttccggctggagtactcggacgacggcagcgcgtggtccaccgccctggacgtcaccgagcagcgcgcctggaccgccaacgaggagcgcaccttcaccgtgccctccgccacgggcgaacacctgtggtggcgcctggtcaccaagcagaccggcgactacggcggcaccctgaccggctcccagtgggagctccggtccctgtggctgtacgacggctcggagctggtgtcgtcctcggagtcctacctggtggtcaagggcccgggcctggcgggcgacgaggagatcttcgcggccttccgcaccagctacaacaccggcacgggcgagtacttcatgatggtgcaggggctgaccggctacctgccgaacgagcagtccccgcaccgccagcccggcctgcacccgagcgggtggccggtcgtgcccctctggggcgcctccatgcccttctggttcgttggcagcggccgccgcgtggtgttcgtgttcaaggtgtcgaccgtcttcgaggcggggtacgccgggttcttcctgccctacgcctcgccacagcagtacccgtacccgatggcgatcggcggctccatgtcgccccgctcggacagctaccggtacgacttcgtgtcggccgcgcacagcgccttcccgatgcccggcagctacaacagcgtctcggccagcgaagtggcggcgttcagcaccaccctcaacgtgatgctgccggacggatcctggttcgacctgcacaacaggccgagctccggcgggcagtccgagtcgtactcccggtggtccagctcccctggctccgtgctgccgcacgggatgttcgacggcaacaactcctcgagcagcgccggctacggcatccgggagaacgttggcggcggcttcaccgtcctgccatcgaccctgttccagcgtcagccgtcggggcggttcctgggcgagctggacggctgcttccagatctcggggttccagaacggctccgagaacaccggcaccatcgaaggggaggactacgtggtcttccagaacacctaccgaaccgacgtacgcgagtactgggccctcaaggcggagtgacatagacatggcatacgagaccggggccgcaacgagcgtcgccgacctgctggacaagctccggctcttctgcatcgcggcaggctggaccgtcaaccggtgggacggcgtgggccagacggcgcgcctcaacctgcagaagaacgggctcttcgtcggcctgtgctcccaccagggcacctccgccctcaacgacaacctgaacgggtacacccagagctccagcaactcctactcctgcctggcgctcagcatggccgacgggtacgacggcgcggacaccggccgaggggcattccgccagcccggcgcgcccagctacaacggctacacccggggctgcatgatctcggagatgacggctgccgtgccggcctaccacttcttctcctactccgactcggacgacatcttcgccgtcgtggagtaccgcaccggccgcttccagatgctgggcttcggcagcctctccaagttcagctcggcggccctgggcggcgcctggttcggtggcacgagcaccaccccgacctgggcgtactacgagcagagcggctacggcccggactcgtcgcagcagaacgagctgatccccttccgcatgggctaccagcggggcagcgactccgccagcttcgtgcgatgcaacgtggactccaacaatggctgggccgcctccaggtacacggcggacacgtccacctacggcccgctggccgccatcggccagtcgtactacgacgagggcctgcgccagtacaccccgagcgctctcggctggcagacggccctgctgcgccagaccgtgtacatcggccggggcaaccagttcgcctcgccctacggcgagatcgcccacatgcgccggctggagatgaccaactacgtgcccggcgacgagttcactctcggatccgacacctggaaggtcttcccgtattaccagaagggcggcgcgaccggccagcgcgggtacgccatcctgaaggaggcctgacatggcagtggtgcagatgaccggcgttttgagggtggtgaccccgacgccggacgcctcggcgctggacacctcgagcaccctgggggcatggacctacccctggggctttcccattgtggagcccaggcactcgcgcgcctcgcggctggccctgccgccggcgccccccgtcgccgtgctcgctcctccgtctttcggatcggaccgccgcgtcggcggcttcgtggatgacctgtactatcgcgtgcacatccggcccggcgtgatcgacctgggcaacctgctgtccagccagacgcgggccgtagaggtctggaacgcccacttcgacggccgcaccctggaggccatcacctcccagggcctggacggcgtgacgctgacccagcccgaggcgccgccgaccacgttcggcgccctggagtcccgcatctaccaggtcagcatctcgaccaacggcgcgccgaccatcgcgggccagtacgtcttcgacttcggcgacgaggagcccaccctgcggctctccggccgccgcgtcgtgctctggcccttcatcccccagacgaagttcagggagtccctggagtggcagacggacctgctgcaggcctactcgtccgagcagcgcctggcgctccgcacggcccccaggcagcgcttcctgtacgagttccagctcgacccgcaccagttctcccgggccaaggccatcagcacgcagtgggcccaccgggtttacggcgtcccggtctggggcgaggtcacccgcctcggcaccgtcctggagggccagacccgcctcgacttcgacgcgtccagcgccgactaccggaacaacgacattgccctgctgtggcaggacgacgagaccctgctgaccgtcgaggtgctgagcgcggacgcctctggcctggagctgaaggtcccgaccgggcgctccttcgagaacgcctacgtgatgccgctccggtacgcccgcaccctgaacgggtccgagttcgcccgtcggcccgacgacatgaccctggcccgcgtggagttcctggtgacgaacaacgtggacctggccgcgtccgccgggctgcctcagtaccgggggcgcgatgtgctcatggacaggtccgtcatgctgtccgacctgtcggagaagatcatccggccggtggaccagttcgacaacgggtccggcccgatcaccgtcgacccgcagcgcggctacccagagagcacccagaccatcgggctggacgcgctgtcgagggccgaggcctggcgctaccgcacctggctccacgcccgccgcggcaagcagaagggcttctggctgccgagctggaaccgggacctccaggtgctcaccaacgtcgactcggccgccacggccctgacggtgcgcccgatcggctacccgctctactacggcgtcaccgacctcatgctcgtgctgaccgacggcacggtgctgtacaaccgcgtgctgtccggctcgaccgacacggacggcaacgaggttctgtcgctcgctgccggcttcggcaggggcttcgctacgtccgagattgacctgctctgcttcatgcgccacgtgcgcctggactccgacagcgtcgagatcacccactcatacgcgggccgctgcagcagcacgatccccgtcatcgaaacgcccgagggagactgatgagctacgcaacgatagaggcctcaagggagcagggcgcgccggtagagctgtatgagttcacccaggggctgcagcggtgggccttcgcctccggggcgttcgaggtggtgcgggacggcgtggtgtacaagccgtccagcgtctcccgcgaccgggtcaagcagtcgacggacatcttcaagaacggcatcaaggtcaagttcccgcgggacgacgagttcgccagccagttcctcgggttctcccccgaggaggtgacctccctcaccatctaccgcggccactacggcgacccggaccagcagttcgtgatctactggaaggggcgcgtgctcagcgcctctgccgccgactccgccatcgacctcgagtgcgagccggtctacacctctatccgccgcccggggctgcgcgccaagttcgagtacggctgccgccacgtactgtacggccggggctgcaacgtcaaccgggagagctaccggcacaacggcacggttatcggtatgagccagggcctcaacgtcgtggtttcgggcgtcgagggcaactacgaggacgggtggttcgccggcggcatcctggtggcgcccgacggcgcggcccgcttcatcgtgagccacaccggcggcacggtcgtgctgtccaggccgctggccagcctcgcgggcgaccaggcggtcaggctgtacccgggctgcaaccacctgaagacgacgtgcgccgccaagttcaacaacctgcccaacttcggcggcttcccgtggatccccacgcgcaacccgttcgacggaagctccatcgtctgagaggttactagcatgatttggtggtatatcgtagtcttcatcgtggccctcgtcgcgtcctacgcgatgatgcccaagccgcagaacgccaagccggcaggcctcggggacatcaccgcgccgacggccgaggtcgggcgggccatcccggtgctgttcggcacgcgggacctgaagggtcccaatgtgtgctggtacggggacttccggaccgaggccatcaaggccaagggcggcaagaagtgacggacgaccgcgccgtggtgcggatggaacacatgcgccggctgggctactgctccgccggcgttcgctcattcttccagcgccacgggctggactacagcgccttcctccgggacggcatcgacgcagacaagctggcggagaccggggacggcatggccctggccgtcgtagaggagtccaaaaatgggcggcggtaagaagcagaccatcgggtacaagtacttcctgggcatgcacatggtcctgtgccacgggccggtcgacaagctgaccgagatccgggtggacgacaagctggcctggaagggcagctcgaccggcggccagatcatggtctgcgccccgaacctgttcggcggcaaggagcgggagggcggcatcggcggcttcatgctggactacctcaacaagtcctacggcgaccgcatcgacccgccgctggacccgtccaccacgccgatcgcggccagcgccggtacggtcgacgtcatgatgggcaaggacgaccaggtcgccaacacctacctggccggccagctcggcggcgcaataccggccttccgccgggtactgggcgtggtgctccgccgcgtctacctgggcaacaacccgtacctcaagctctgggccttcagggctacccgcgtgcacacccggcagaacggcctggcccagtggtacgacgccaaggccgagatcggcgacggcgacatgaacccggcccacatcgtccgcgaggtgctgaccgacccggactggggcatgggctaccccgagggcgacatggacgagaccgcgttccgcctggccgccgaccagctgcactcggagtccatgggcatgtccctgctctgggacacccagcaggacctgagcgacttcctggcgatcgtgctccgccacatcgacggctcgctgtacaccgaccggtcgaccggccgcttcgtgctcaagctggcccgcggcgggtacgacgagagcaccctgatggtgctggacgaggagaacgtgatccgcgtctccgacttcaagcgccgcacggttgacgagctgaccaaccaggtcagcgtggcgtactgggagaagtcgaccggcaaggacggctccatcaccgtgcaggacatcgccctagccgccaaccagggcagcacggtcggcacgaccatccagtacccaggcttcaccaacggctcgatcgcgaccgtggccgccgcccgcgacctgaaggccctgtccaccccgctggccaccgccaccctgtacgcgacccgcgccgcggcgtccctgaacatcggcgacgtgttccgcttctcctgggcggagtacggcgtggagaacatcgttttccgggtgaccaacatcgagctgggcgagctgcagagcaaccagatcaagctctccgtcgtcgaggacgtgttctcgctcacctcggcgtcctacgccccgccgccgccctccgagtggcagcccccgagcggcgaggccctgccgtcgccctaccgcctggcgatggacaccccgtactacctgctcgtccgggagatcggcgacgcccaggcccagcagctgccgaagacggccggctacgccctggccgcgggcgtctcgcccggcgggacctcgatgaacatggcgatgtacgttagcgccggcgcgggctacgccgaccagacggacctgagcttctgccccaccgccgtcatcagcgccgcctacgacgacagccccgagaccaccgtcatggccctgggtgcgacgaccgactggaccatcgtcgaggcgggcgacctggcggtcatcggctacggcccctcgaacgccaaggagatcgtccagatcgtctccttcaccgacacgcaggtcacggtccggcgcggcgtgctggactccctgccgctcccggtcgcgtccggcgcccgcctgatcgtgctgggccagggcggcgagcacaccggcatggactcgaccgagtacgccagcggcgagcaggtgtccgtcaagctgctgacgaacgcggcccggggccagctcgccctggagtcggccccgaccgacgtcaccccgatcctggcgcggcaggcgaggccctacccgccgggcctggtgcgcgtcgacggcgccaggaagcccgcgaccgcggccggcccggtgtccgtcacctgggcgcaccgagaccgcacgcagcagaccggcgacgtcctgccgacccaggacgccgcctcgatcggcccggagaccgggacgaggtacgggatgaggttcctggacgctggcggcgcggtgctggtcgctcgcgataacatcagcggcacctcggcgaccggcaacctggcgtacaccggcaacgtcacgatggagctgtactcgatcaccgacgcgggcgagagcatcaaccgccaccgccgcaccttcgcctacacggcggccgtaggtacgaccgagagcaccatcacggcgggcacctggacccccgacgaggtcatctttgacggaggcggagcctgatggcaaccatcgtagtaccccagcgatttgcccagcgccgtgacacgtcggcgaactggaacagcaaggacccggtcctctggaacggcgagatcggcttcctgctggaccctggccaggccgtcaagctgaaggtcggcgacggcaccaagaagtggagcgagctcgacttcttcgcctccgacggcaagccggtgcagctgcgggcggccgacgggtacatccagtggaactacgtcggggacacgtcctggatcaacctggtctccctggacaacctgcgcggcgcggacggcgacgacggggccgacggcaagagcgcctacgagatcgccgtcgacggcggcttcgtcggcacgatcccggactggctggcctcgctgaagggcgagcccggcgacaagggtgacaagggcgaccccggcaaccccggcacgccgtacgcccgccgcatccagcacgtggccgacaccgacgcaggcaccttcgagtgcgactggggccagtacgacgagatccggatctccctcacggccacggtggtgttgagcttcaccggggccatcgacggccagggctgcgtcttgaagctgcgccagccgccggcgggagggtgccaggtcgggctgccctccggcgtggtccggttcaactccctgatccaggcgtacgccgttacccagaccgggtcgcgcgcggacaaggttggtttcgtctacgacggtgaagacgcacgatacgacctggtctccatcgttcccgggatatagcccatggacgagtaccagccgccccaggcactgagcgtgccgttcctgttcgacggcacgtacgatccgccccaggccctgaccctgggcttcgtatttggcacggacggcggcgggggcacgacggacccgctcccgtcgaacttcatgatcctactaaccatctgaggaaaccccatgaccgtccgagtgtactccagctccgacccgagcgcgcccgtgctgaccggctcgaacgccggcgatctgctcaacctgctcaccaagtgcctggtcgacggctacggctccaaggccggcgccggctggaccaagcccttcaccgccaccaaccgtgcggccttcaagaccggcgcgggcagccgcggccggtacctgtacgtggacgacacccgaggctcgtcgacgtacgccgcccgcgtgtacggcatggacaccatgaccggcatcgatgcgggcgacggtcgctggcccaccaacgacctgatcccgggcggtctgtactggcacgtgcactacaccggcagcacctcggccggccggccgtgggtgctcgtcgcgaacgagaagatgatgtacctgtacctccagaactacccggacgccggctcgagcaacacccagtaccgggagttctactggttcggggactacgacgcgtactcccctgccaacactttcaacacctgcatccagggcaaggccagcagcagcccgaccacctccgaacaggagcccttcgtctcgtacaacgtcagctcgggtgcgcccggcctctacgccgtgaggtcctacaccggcctgggcggccccgtgcagctcggccgccgccacgactactcgctgtccggctccggcaactggggaggcaacggtagcctcagctacccgcacggccccgacggcgccctgatgatgtccccggtctggatccacgagccgggcggcacgaacatggcggccctgctcggcaagatgcccgggctgtgggccccgctgcagtacgtgctgaacaccggcgacaccttccagggcgagggcgacctggccggcaagaccttcctggcgttccgccagtacgagggtcgcgccgtcatcgagacctcggacacctggagctgaccgtggccgacctgggcgcaattggcgcttcgtacgggctggggtcgctccgcgggcccaacccctcggcctacagcagctacgcccgaccctcggcgcggcagacggccgtgccgtcacctcggcccctcatggggcggggcttcgtgcgctacagggtgccgacggccgtgccgggcaccccgtcctgggccggaggtccgaggcccgtcggcgccgagccggccgcggtgtacgcggtcggcggcacggtgaagcagaggctaaacggcgtggactcgccgctggcgaactgcctggtgcgcctgtacgccaggcggaccggcatgcccgccggcgcggccctgaccggcctggacggatccttcagggtcggcaacctgctgcccgagaccgccgggttcttcgcgatcgccttcgaccccgacggtgccccggtccagaacgccctgatcttcgacaggctgcaggccctgccgagcgtgccgggccgcatccgcaattccgcgccgagcttcaccgtcgacgtggcggtgtcctcgcagctcaccacggcgtacctggtcggcgccccggcgttctcggtcagctccggggccctgcccgacggagtcgccctcagctcctcgggcctgctgtctggcaccccgacgaccgatggcgaggcctactcgttcaccatcaccgccaccggctccatctacggcacggcctcggtgacctggtctggcgaggtcgccggcggtatcggctacctgaacacgctcaacggccgtaccggcctgaacaacgtctggtccggccaggtggacgacagcaacaccgtgctgccggcgctgccgttccagttcccgctgttcggcctgacgttccagaacaacatctacatcagctccaacagccacgtggacttcggcttcgggtcgagcgcgtactctgggctgtcgcccaccaacccgggacgggcgctgctcatcaacgcggccgaccggtcctaccagaacgtcttcgccgggcccgtgctgtctggcgcctgcttcctgatccgatacgagggctcctccaacactggcaacagcaacgacaatctgtgggaggtcggcctctacaacgacggcagcatcacggtcgtcaccggcacggtgccaggcagctcgtcgccgaacggcgcgggcacgtccaacatctcggacggcaccgcctggcgcagcgtcacgccgcccaccttcctcagcaacagggcctacctcggtcagccgaccgggcctgggggcgacttcgtatggacggagattacgccgtgaccgaccgcaacgagaactggaagtcgagctggagggtgcggcggcgcttcatgttcgccgtgtcggccttctgcatgtgggtcatcgggtacgtgctgtacaagaacctggcctccgggccggcggacacggcaatcacgatggcgttcctgacgctcatcagcatcgtcgggtcctacgtgttcggcgccacctgggaggacgtctccctggcccgagccaagctgaagaccccggcagggaatgccggcaagcccgccccggcaccaggggcatcgcagagaatggaggacataccatgagcttcgcactgggtaccaagtcgcgcgccagcctgaggggcgtgcacccccacctcgtcaaggtggtggagcgcgcaatccagctgaccggcgtggacttccaggtctacgagggcctgcgcaccagggagcgccaggcgaccctggtggcgcgcggcgccagccagaccatggactcgcggcacctgcccggccgggacggcctcggccacgcggtcgacctcgtgccgctgatcgacttcgacggggacggcaaggctgagctgcggtgggactggtccctctgctacaaggtcgccatggcggtacgccaggccagcctcgagctgaacgtgcccatccgctggggcggggtctgggaccgcgcgctggccgacctggccgaccccgaggacgaggtcgccgagtacgtgggccgccgcaaggctatgggaaagaaggcgttcctggacgggcctcacttcgagctgcccgccaacatctacccctaggagggtgacatgattccgttgggatacaagctcggcgctggcgcgcttatcggggttgctttggtcacgaccatcgtgctatcataccgccattacgacggcctggtcgaggacaaggccgagctcagcgcccaggttgcagctctcgagcagggcaaggcggcggagaaggccagggcggacgccctggaactcgccatagacaagtgggatgatgccgccaagatccaggcggagtcgctcgaacgattctccactgtccagcgtgaggctggcgaaaccacgaggaagctgacggatgtcctgtcaaagcacgacctcggcgcgctcgccagggcgaagccgggtctcatacagtctcgcatcaatgctggcactgctgatgctttccgcctgctcgagcaatccacccagggtggacccgccggcggagcccaagcagcccccgctgcccgtcctgccaaagccccagcccgtacggactgagtccgtacagtggcggctggtccaggtcgacggcgagaccctcttcgccgtaacggcccgggggtacgagtcgctctcccgcaacctggcggagacgatccgctgggccaaggaggcctcctggcagctcgacttctgccgcgacagccgccagaccgacaagccccagggggaatccaagtgaccgcacagacgcccggcccggagcagcagctccacaatctcaccccagacgaggccagggcgctcattcgtgaggctgtgcgggagacgttcctcatgctcggcctgaaggtcgacgaccccatcgaggtgcagaaggacttccagcacctgcgcgagtggcgcagcaccaccgagaccctgaagcgcaagaccctgctgaccatgctcggcatcgtcgtgtcgggcatggtgggcgcccttgtgatgggcgtcaaggagatcttcagcaagtgagccccgcggcgggtgcctggcttcctccttctccaggcatccccttccaccgcctccgggcggtggctttttctggatctcagacagtcaggccgccttcgggcggcctgactcgtcctaggccccgggcctaggccgccttggatgccagggccggcctggaatgcccggaaggcacgccgtggcagcctcgggcgagcacgaccgagccgacgaccacggcccagaacaccacgctcagcccgaccgccagggttatgcccctcgcggcccgcagcccgtcgtcatttccctcatccagctcgcacatacgatgatgcctcccagggacagttcctggaaggcatcatggcgtgaccccggcgcggtcgacgccgtcagtagacccacacgcgctggtactgctcgggcatgtgctcgcagctccactcagacttccggccctcgtactcggccttggggtcctcgacctggacgcactccttcgagtgccaggagacgtgcacgatcgggcggtcgagcgcctgcgcgaacgtcctgatgaggaggacgcccatgacgaggacggcgaggacgcagagggcttgggtgaggtagtggcgtggcatgtgggtctctccttgaaccgtggccgttactggcggcttgccggtgcggggtgggtgggctggggtgtttcggcgggcggctcgccggcggtgatgcggatctcgccagacacgtagtcctgctcgatcccgatgaacttgccgccaatctgctcgagctcctcgcgggtcacggtcaggccgccaggcgtgcgggaagccacgacgccgagcagcgcggtaacccgctgcagctgaatctcgtgcgggcagacgtcgcccgacatgaggcgggccagcagttccatcgcgtcgttacggttgctgctcatactgtttggtctcccagtttatctctacggaagtggtgcccttggcgcggcacttcgccacggcgggcagcttgaggtcgaggaccttcgccacggcgggcgcgtcctgcctcgggatgtatcccagcatctgcccgcaggcgtcgtacacggccacggcgttgcggtcgtactggttgtgcggctcccgcctgagggtgaggacctcgtcggtcctcaggtcggcgatcgcctcgcgggctcccttgtggtgcacggagcccacgatgtacgttctcatctgtgacattagccctccttcttgggctgggcgcgcgggcggttcggcaccttctcgccgcgctcgcgcatgtggacggcataccagcggaggcatgccacggaggtcttggcgccgtcgaactgctcgcggatcttgtcgaggatggtctcgtaggagtgaccgtaggggcggccgtcctcgtccttgctgatgacctcgagcagcaggccctcagccacgacgcggatcacggggcccttttccttcttctccttcgcggccttctccttcttcggcttggtgggcttggcgggcttggaggtcatctgcgccagcagcatgttcagaccgttgggctcctccttcgccttctcgatcttctccgacagctcgggggtgggggtgccggcgagctcgacgatggcggcctcagtcttgtcagcctccatggaggcgatctgctcgagcagcttggccttgccgcgcttcgcgaggctcttggggtcggcgcccttgccgctcagctcgttgtggcgggcggcgatgtctgcgatgttggattcgttggacaggttcatggtgatctccttggacgggtcggttggatcgaggacgcagtgcgtgccgtcgatgggttccattatggcgggttgtgggcgcgatagtcccaacacttgggctaccgcgcttgaatgatggggttactgtgcggcttcaacagtcttgaggacctgtcggaactgtgcaacggtcatgccattgatgacggtggcggtggggttcttctgacggacgagctcttcgctggcacccttgatggtgtacagcttggagtccttcatgatgcagaccttgcccttcgtgaggcggtcgtactccctcttcgcgaggatgtcagccgccatcgaacgcagctccacaatgtcgagcagcttgtaggcgtcgatgcgggagaactcgaagtggggagacgcctcgtcgtccatgtcgatgacggtgcagtaggccttgccgtcgacgtacaccttggcggtgaagccctgacgccactccttcacgaggtactcgacggacttgagctccaccttgaccttgcgggcttccgtgggggccgccaaggccttggcggcgggcgacttcttcatcttcgagcggtagtaggacacgcaggcggcggaggtgctgccttccgggaaggccttcttgacctcggcgagcaccgccgcgttatcgaggcccgccgagatgcccgcgcggatcacgtcagcgatggtcttcggcttcgcgatggcgaccgtggccgcaggtgcctcctcagtgggaggcacgtagtccgccgtggtctcgatcacgcggtcgaagatctccacgtggccctcctgaccgtagacgccgcgccaagtgcggccgttgtaggagacgtagccgtagtaggtgcggctgccctccttatagaggaagccgtcggacttcttgaggtcggacgcgccgaagtcgttggcatcaatccatgcggtgaacagcttggatgcgtcggcgagggttgccgccgggtggcgcttaccgccaaacttgacctcgaacatatcgtgcctcacgtgtttgcgttggtgtgaggtcattatatggggtcttttcccaaatgggagccccctccagcaaattattttgctaaagtttcgcgaaggccagtttggcgccgtacatataaaagagaagggcccccggacgtctccggaggcccctcaggtcccctgacactggttgtccccggccgtggctcagtgcacggtgggcttgctggtggtgcggccgtccttgacgttcacgtcctcgccgtcacggcggaggcgggaagcgtaccactggacggtcttgacggaggtgttcgcctccgggtggcgggccttgatgatgtccaccatcgccgggtaggtgagggcgcgcttgcggcggcccaggacgcggacctcctccttgatggtgcgggcggtgttcggcatgactgattctccttcgttctagtgtgcggtccgggtcgtcgcccggttgtcgcatgccccagtggtggagcacggagtcagtatgcgcttacgttccgagccaaaacaccatcgttccagctaggcgagcatgctgcgattgcccaatgagtttgtcgcaaactccagcacctcctggggcgtgtggtccgggcggagcaccgacatggcggccagctcctcctcggtcaccccgtcggccacctcctgggccttgaacccgggcaccaggtagcggcgcacgtcggtgcccttgcccacccgggcgtagatccagcagttgccgccgcaccgccacctctttctgtgccacacgacctgggcctgcctgacctcgaagccgagcttgccgccccgcttgggccggtcgcagcccttcagctcgagctcgaagtacaggccgttccagcacccgtccacgtccgggtcgcccgagctcaccaggttctcgacccgccgcatgtgcaggccggcggtgcccttcagccggtcccgcagccactcccagagccttacctcccgggccacttcatgtcctcggtgaagacgcgcaccttgacgtcccctatggagatctgcaccggcgtgtcgccgttgttgggcaggaactcggccagctcgccggcgtgcatgccgccgccgagctccgttggcacgacggtgatgaacgcccgggtcacgtagcccagcctgagcgcggcgagcgccagggtcgggccgccgatgagccatgcgtccgggtggtccagctgggcctgccccagggacttgccaaggccgaggttctcggcgtcgggcgcgcgggtgatgcgaaccatggagcggttcggcaggcggggcatctggtcgaaggtcgtcgacccggcgagcaggacgtcgttggcgttcgacatggtgagcaggcggaagatggccttgtccgtcttgcctgtccagcgcatgtcgtcgtcggcaccgctggccaggtagccgtcgatggatgaagctagcagcagtcgcattggttgtactcctctaggtaggtgatgtggatcccggcgagggtgagcaccgcgatcgacgtggcccaggacttgccccaccgatggtggccgaggtcgggcctcggtgccaccaggcggcggatgcccgcctccctcagcttgcaggcgcacgggaggcaggggaacgaggtcacgtagacggtgcagcccgccgtggggaacggtgcctgccggaggcagttgtcctcggcatggaccatgttggccagcttgaaggcgcggtcggccaggagcgacggcaggtcgggcacgtccggcgggaagccgttgtaccccggggagacctgccgccggtcgggcgtcacgaggacggcgccgaccttgcggtccgggtccttcgacatggccgcggccagtacggccatgcggtagaagaacccatcccactgttcctgggatcgcttggtcggcacctccatcactcaatgacctcgggcttcgggttgtacgcgggccactggtgctgcttcgcctcctcggcgtagcggaccacgtagtcgtcggggtgctgctcgacctggctcagcgtccagcccggcagcgggagctgcggcaccacgggctcgtgctggagcatctccgccgccatctgccagtgcgactcgtacaggtgggcgtgggccagcgtcacgtgcatcacgcccggccggatgcgcagctcgtgggcgacggcgtccatcaggagcgcgtggcccatgacgtcgtacggcaggccgacgaacaggtccgagctgcggaggaacaggctggagtgcagctcacccccggtgatgctgaaggtgaagctcgtcgggcaggggacgttcttctgcccctgggcgcccaggccgtcctcagccgggtcccaggcggacacgtagcacctgcggtccgtcgggtccttgcgcagcgcctcgaccgcgagccgcagctggtcccggccgaagtggcgacgccagcggtagccgtaagcagagcgaacccccgggaatgcgacacccgacttagcctcagtgccggcaggagtctgcgggtagatcggctcgacaaacttgtcccacaacggcgcgtacctggtgatgaaggcggcgtcctgctcgccccgcacgtaccaggcgacctccgccgcggcggaccgcgggaaggtcttgcggtagccgacggtcggcaggaggccgtcgctcaggtcgacgcggaacgccgtgcctccccggccgacgtggacgcgcgttccggtgcgctcgttcgcctcgatcgggctgctgaaggcccaggcgatcagtgcaccgtagacgtcgtagaacggcatgaggacgccgctcacttcgcgcccccgaggccctgctgcttcagccactcggcgtagtaggtgccgtagttcaccaggtcgcgggcggtgtcgtacaggccctcgtagttgggctcgcggccctggcgcatagccgtgatgagcgactggatgcgcaggttcttggtgtggagcatgtgtgcgtaggactcgtggccgaacgggaagtaggcctcgcgcccgcccgggacgttgttgtagtcctggcccttggtctcccgcaggtgctgcagctccagccacaccgggctgatggcctcgcggccctgggcctgctggcgcagctcctggagctccgccacgtcggacaggtcgaaggtgagcagccagtcgtggttgggcggctgccagccctcgggcttgacggcgtcgcggccgttccagccggggcgcttggacaggtcgccgcgcaccttcgccatgttggcggcctgcaccgcgtcgaacacggccagcggtggcacgcccatctcgacgaggcggcccagggcgaagtagatcaggtccaccagggcgtcggcggcctcgagcacgtcgccgtcagcgtgggcgtccttgaactcctggatctcctcgttcagggcgtcgaccgaggcgtccatgcggatgctggacaggatctccggggtgcccgggatgggcgtgtccaggatctggacgttgaactgctccgctttcaggagcatgcggctcaccagtgctgctaccagggcctggtgcgggccggtcgtgtcgatctcatccatcttgctgcttcctcagttgttgaaggtaccacgtgagcttgccgtccgtcgggtcgacgtcggtcctgccgtctacgaaaatcgcccagctgtcggcggcgtacttgccgcagccaggcagggactcaatcttgacgcttcgggggtccacctcgagccaccgagctgcgagcctggtgagagtgacggcccggcggcgccacagccccaggggccggagcgcgtcgtgcaggtcgtcgggctctgcccgggacagcgcctccgggctcgggtagtccgccatcaggcggtcgagcgcgggccgggcctgccgccaggtcgtcaggttgaccaggctgcaggcgaccagcatccagaacggcgtctccctcagccgctcctggaacagctcgcccgcttcgggctcgtcgccctcccaggcctcgaccctcaggaggcggccgtggcggcgcaccctccagcgcacctcgttcatcgggccgcagcctccctgatgccccgccgggcggcgcagaccagggcgtccaggaactggcccgaggggctgccggccagcgtcacctggcaggacgcgccgccgcgggtgacgcggacgatgaggtggtcaccccggctgaaccgtacgggctccacctggaacccgtcgcgctcgagggccgccaccccctccttgtgcgggcggagctggacgcggatgcccatgctcaggcctccgccgtcttcttggcgcgcggctgcttgggggcaaagcactggtggccctcgggcaccaggaggcgggcctgctggctgtcctcgctcagctcgtagcccagcccgttctccttgttgatggtgaacaggtgggacagcacggcggagcggtccaggtccagctgcgccatggcgtccgcgatagggaagaagcccgagacgaagagccgggccaccgtggcgcgcttgccgggctcggggatcggccggagcgcgtcctggttgatcggcttgccgctcgtccgcttcttgggctcgtagaccgtgccgtcctcgttgaggcgctgcggcttctccggcttgggctccttgaccggctcgacgtatgcgaacaggtcgaagccctcgggcaccagcaggcgggcgcagtcgtttaccagctcgtagcctacgccgtggtcgcggttgagggtgaacaggtgggagagcaccccggagcgggacagcccgaggcgggccatcgcctcatgaagcgactggggctcgtcgtgcaggaagaaggcggcgacctggccgcgcttgctctcggggcggcacgggcggagggagtcctcgacgatcggcttgccgccgcgcttggagtcgtcggacttgcacgggtcgggcggcgggggcaggaacttgggcaccgggaaccccatctcggtgagcaccatggcggccacgccgtagtccttctggaatcccagcttgacgcaggtctcccaggccttctcgatgtggtgcgcgatcttggacggctcgacgtcgaagcgctccgccgtctggagctcgccgcactggttgctgacctggaaggcctccagggagtgggggcagaggatggtggaccgcttctcgcccttaatcaccacgacgtgggcgaagccgctggtcggcgggtcggtgatctcgtaccggcgcttccagaagttgggtgcgccgccccgcacgaagtagaccttggcgaagacgatgttggctggcagcatggtggacgtccatatagagaaagggacctggtctgcaccaggtccctctatcttatggcaggggccgcgccccttaaaccatcatttccaggcgaactgcccggccgcttcggtgattactcgaagatgcccttgtcgccggcggactcgccgcgctgggcgtccgcttccttctgggccttggcttcggccttggccttgtcggcggcttccttcttggcctgcttctcggcgtccttggcggccttcttctcggccttggccttctcggcggcttccttcttggcctgcttctcggcgtccttcttggccttggcctcggccttggcgtcgcccttcagctcgcgggcggtcggcaccttctcgccgtccgagcgcagcttgttgcggtaccagttgatgctggccatggaggtcttggcttccgggaactgctcgcggatggcagccagcacttcttcgttggtcttgccgtcgcggatcaggcccttggcgatctcgccgacgcccggggccttcggagcctggtccttggtctcggtcgcttcgccggaggtctgggtgctggtgtcttcgctcatctgcatctctccttcagagataggtgttaggattggactgtcgccgcccgttcgggcggcttgcccggcgtgcgtcagtgggtgtagtttaacgccgggctaattgtcgtggagccgtcgttcgcacgtccggccgggagtatcacagctgctgtctgaacagagccagcagtcggtcgcgcaggcctcttccggctagctcctcggagatggagcgcttcgactccaggttggcgaggatgtactcgtccaccgaggccggcgtgacgtagtccctgatggtgacggtcttgccgccgatctgggtggcccgctcgttggcctggtcccgctcgatgaggtcgaacgtgtgcgagtaccagaggatgacgtccgccgccgagaggtccaggcccgcgccgccggccttgggctggccgacgaagaccttcacccgagggtcgttgttgaacaggtcgatggcctcctggcgcttcgcctgggagtgcacgttcccgtggtactcgacgcaggcgatgccggccttctccagggtgcgcaccacccggcggatgtcctcccggaacttgcaccacacgatgcacttccggtccgactcgcgcacgtcctccagcatgccctgcagcctcgggttctcctcgtcggagaccaggtcgcgcacgttgccctcggagtcgatgacccagccgctgatgagctgctggagcttgatgatccgcgcgccgccctcgaccgcctccacctcgccgccgtcctcgagctccaggatcatctccttcaggagcttcttgtactgggcctgcatgtcctcggacaggagcaccgtcctcgggtccatgagcaggtctggcatgtcgtcgacgtcctcccggagcacgacggaggcccacctggacatcctggcctgcaggtcgtcgaggttcctgtagtggtccaggcggtcgtaggacctgccgcccttggtcttctcctgcacgtagtaggcgtactggctctcgaactccccgaaggtggcgaagcccagggcgtggtcctcgagcagctcgaactggctgtacgcggccagcgggctgttggacaccgaggtgcccgtcagggtgcgccgcaccctgcagtagcgcttgagcgcccgtgcccgcttggtgcgcttcgagccgggggaccggaagtcgtgggactcgtcgaccaccagcatgcaccggcccttgtgcttctgcaggaacttcttgatgagcgcggccggcttgtcgtggatgatggactcggagttgacggcgagcaccgacaggccggactgggcccgcaggacgcggtccagggacgccgcgtggccgggcttgctcgcctcgctggcctgccaggcgtgggcgacgtactcgacgccctcccacatgtggatcggcagctggcggcgcacccagttgacgtgcacgccgttcggggcgagcaccaggatgccggtgatgtcccccttctcgtaccggtagcaggccaggtcgagcaccgacttggtcttgcccgtgcgcatctgccacagcagggcccgggcgtcgtcgtcccggtggcggtcccactcgtcctgctggtgcttgtagttgggcagcctgaatcggggcgtcactctatcgtctccttgcgtggcttgaactcttcgcccaccagctcccaccggtccatcttccagtacagcgagtcgagcagcatggcgatcttccagccgcgggcccacctgagcgccggcgtggtccacaccacccgctcgtcgcaggtgatgacagtagacgccgacttgtacggggccttctggtccggcttccagtagatcttgtatctcacttgcggtacctcattccggtccagccctccgctttcaccgggcacccgtcggcccacggcatggtgtaggccatcgtggcctcgaagtccttgacgtcgccctggtccatgtcgcactccgcgatcagttcgtcgtgcaccgacaggatgacgctgtacaggccctcctcgtggcaccttagcatggcgtccgccatcaggtcccgcgcggtcgcctgggtgatgttctcgacaagcatgccgccgtaggtgtcctggcgacgccacttcttggtgtacgggtccacgcccatgtaggtgagggcgggcttcttctcgccccagggcgtgggcttcatgacgacccgcgggtcgcagtagcccagcagcctgccggacggcagcttgcagtgcaggaagccgtcgaagcagcaccactgcaccttgccgcacttcacgacgcggcccggggtccggacggcggcgatcgccgcggcctcctggtcccaccacatcttcttgacccgccagaacttggcgcggtaggcgtcgacgatcttctgggcgaactccagctcgatgaagatgccgtacttctccgccagggtgttccggaacttgttggcccccatctggtagcccaggcccaggaccgcctgcttgcccatctggcgctcttcggcctgcgcctccttgtcgtggatcaggcggccgtagatctcggtcgccatcgccatgtagatgcactcgttccgccggaacacgtccagggcctcgtcgtcgcccgccagccagagcacgacgcgcgcctcgatggcggcgtagtcggccaccatcagcctcttgccctcggacggcacgatcatcccgcgcagggcgtgggacagcagctccatggcgtccccgtagagcatctccatcatcgccaggtcgcgcgacttgatgacctcccaggcgagcgccatgttcttgatgttgccgcgggggaagttgtgcggctgcaggcccgcgccggaccaccggcccgtgcccgcgccgtggtagagcaggcccccgtggaccttccaggtctccgggtcggcccagttctgcgccgcaatgaacttggcggtgctcgaccgcccgagggccctgacgagctccagggcgcgcctgaccctcggctccaggtcctcccgcttgagccacgagtcgatggtgccgccctgggtgttctcgatcggcagcccgttgtcgttgaaccactcgatcatgcgggcgcgctgcgtcgccttctggacccggccgtcggtgatctcgaccagctcggcgttcagctccgtgtagatgccgtcgacgatctccagcgccgcctcgatgccctcccggtcgagctggaacccgcgctggttgatcgcctggtccatgaggtacatctgcgtctcgcgcggggacaggtcgcgcaggcggtccgacacggcctcctcggcgaggacgtccacgcggcagtaggcgcacaggcgctccagcagctcggcgctctcgacccagaacaggggcaggcggaagacctcctcctcgacgtccggggtcggggagtgggcgacggccgtgtaggtcccgtcgtcgttcgcgaacaggtcgatcttgtacttcttggcgggcagcggcagggtgccctcgtcgtcgatccaggcgaccacgtcccgcttgagcggcttgcgcggcttcgccatcttcttcatgatcttggcgccctcggtgtccttctccaccttcagggccagggctggcgccagcagctccagcttgcgcggaagggagtacgccgccgccttggcggccgagcacctccactgctcgtggccgaccgcgggccagcccatgcgcgggacgcagacgttggtccagatgccccgctcgaaccaggcgttgtgggcctccaccaggcggccctccctgatccactcgaacagctcggcgagctcggggcagtcggcctcctcgacgcccaggtgcgggaaggcggggtgccacagggccgtgcggcccttctcccagtgcggcaggcggaacgccaggcacatgacctgggtcgtggggtcgagggagtaccgccaggagccgcagtccttgatggagcacgcggagcgggtttcaaagtcgatcgtcgccttgggggcgttcgtctcgtagtggatgcccgccgtctcgtacaccgaggcggaggcgatcttgaacagggccgtcttgacggccgcggctacctgggagcgctccggcaggtcagagacctgcgctggctctttgttcggggcgattaccatggatcctccgggctagccgcttactgtatcagggcggctcattgaagtccgccatcatctcccagtgtttgaatacctcgccggcgcggatgcactcatccctggtcaggttgcctatgtggaactcctcaccctccggcatgcccatcatcctggacagcatcttgtaggtcttgaagcgggacatgtgcccgtccttccagagcgggtctatcatggcgtgcagggcggacctcagcgccctggtctctctgtccgccaaggtgccgatggggtagaccgagtgcgggtgcaccccgcagtaggccccgcaggacatacacaggtagatccagggccactgcccgacaggctgcttgtagactacctcgttgcccgtcaggacgaccaggcgctcgccgcagctgtcgcatgcctcgggcgggtcgcgccagtgcttgaaccgcttcctgcggtggtatgccgagaacttcaccagtccacctcctcctgcacgatggcgcgcacgtatgcgtcgaccacggggtccgggtcggccgtggcgcccttggcgaccgccagggccgccttctcaagccggccgacgtcgatcgcacctatgcgggcctcgcgcaccagggcgttcttggtggcgtacagcggcttcagggccgtgagctgaacgcgcgacagctccgtccaccgccgaccgatcgaccggaccacctgggacagcctgacggtcctctcccccggcacgatgcccgtgtcgtcgacggccttgccggcgaagtccgccacggccgccaggtccctgaggggccaggcggcgagcgcgcacagggggcacggcagggagtgctggtggtcgtcgcacttcaagggcgcacctcgtaggcggggtccttgatgagctcgtgggggtagtagaagacgcagctggaggccccgtcgcgcttgacccacacccggccgtcgggcgcgtggaactccaccgccccgcgggcgcccttgtggaagccggcgtgcggcgccacgatgatccgctggccgaccccgaagtgctccggctcgtcggggtccatctgggtggggatcggctcgaccaggagcctgccgccggccttcacgacgcggaagggctggctctcggggatggtcagcagcttcgagccgaagccgccggtcaggatgtaccacagtacggtcttcagccagctcatgcgatgtgctccagtgcggcctgctgctcttccataggccggtgcagggtgaagccggcggccgcgcgggcgcctgcgtggaatgccccgccgtcaagctccttcttcttgaacgcgtcctgctggacgacgccgtgctcgtagatcctgtcgcagtgccgctggatggcgcggtcctcggcctccgtcggggcgatggcggagatctggctgtacacggagttgagccagccgatgtggaaggcctggcgcttgccgccgtcgcccttcatgtcgggccggcgggtcagcaggtcgtcccacgaggcctgcatcgcccgccacaccaccttgtgggcgtactcggccagcatgacgcggcccttggggccgatgtagcggacgttcaggcgggcggcggagccggggttccgctcgaagacggccttgacgccgaaggcgcgctccatcatggtggccaggttgctcatggtgcgacacttgccgaagccctcgcgagtcttgacgaccacgtcggccgtgtccaggccgtccagctcgtcctcggtgatgcccagctcggacatgatcttctgcgcctgccggagcgccgcggccgcctcgtgcggctccgggctcttcgagagggccatgcacttcttcagcttctcggtgagccgcttcctacgttctgcgtccatcttcactcctcctctttggtgaggcccagctctttggctgacgcccagattgagttgccgagctgcggggaccgcgatcccctgacctcggagcggtcgtcgccgtcgtacagcgcccagccgcggtcgtccttgaggaactggtagttagcctcctcaatgaggtccatcatgcgcttcgtggggctcacttgaaccccagcaattcagcgccccgctggagcagcgacttgcgctctgccgccagcctggcgcgggcccgctccagggcctcgcgctggccgggcacgggcgccaggacgcgggcggcttcttcacgccagcgctggtcttcgttgcgctggtccaccagggccaggttggcctgccagtctttgctcacggtctgtgctccgaaacagtgtggggctatcatgccggggctttccgccctgggacgccatcaaacgggcaaaaagaaggggacccgaaggtcccctcctggggcttacctgcctcgtcggcggtactgaccggggcggtcaggctggacccgtcagtccaggaagctgccgccgcccgaggactgctcgccctcgccgacgaagtcgtcgacggagtcgaagtcgttctcggcggcggtgcggccgctgaacgccgcgccgtcgcccagcttctgcacgttctgcaggccgaaggcgacgcccttgttgccggccttgtcgtagccgtaggccgtcagggtggcgcgggcgtagcagccgctgtagaagccgtcctcggacacctcgtcggtgatgaggcgattcagctgctggtcgacgcagcccggctgcatcttggtggtggcggcgacgaacaccatgccctcgtagccctccagctccgacttctcggcgccgtcgcggaaggggttgcgcaggccgtggtaccagccgttgccgtccggcttgagcttgtcgccgaacttctccttcgccgcggcgtgggccagcttcttcatggcctcgaactgggccgtcttgcgggccgccgcgtcgaacagcatggtgacgccgtacttggcctcgccggtgctgccctccatcgggggctgcggcttgaagatccaggcgaagctggcacggaacttcggggaggtgaccttgcggtcgttctgcttggctgctgccatttgatgcgctccttagtagcgatttgactgtttagcgatgtaggtggagtctgccccggtgccgggtctgtttgccgccgagacgcaacccgagagggaggcggtggacggcgacaccggggcaggcgctcattattccggggtctgcgtctcgtcgacaccaccgagcggccggtcgagctcctcgtcggtgaagcgccccgacacgacgctgaccaggccgatgccgtagtgccaggactgcgccgccgacaggttgtcgcgctgcagctcggccttgtccggctcgagccgcccggaggccacggcgcggtcgagggtgcgccgccaggcggccatggtctccgcctcggtgcgcgtcacccacttgtgcgtggccgacgccgggaggtcgtacagcggaccggtcatgccctgcaggtggtgctcgaacgtcttgccgccgatgtggacgatgaacggggtcacgccgtcgcggctgttccacaccttcagcacctcgggcgcgtccggcttctcggcgttggtctggatgtaggtcatcagacggaacgcctcggcgtgctggaagttcggctgcgacgggtcgacgttctccgtcgcctgcttgatggtcttcaccagggcgcgcaggcggaccacctcgcgggccaggtccttcttgccctgggcggcgaggcccctgaccatgccggactcctcctggatgaagtcgagcatggcggcgtggagcgcctcgcggtggaaggccttcaggtcctccttggtggggttgccggcgcgggcgcgctccaggcgctcctctagggacgggcccctgtcggcggcgcagtcctggatcagctcgcgggagcgctcgatctccctcaggtcggccttggtgagttcctgcatgggcttgtgttcgtgcatggtgttctcctggtaaaaagaaagggtggaagcacatcatgcttccaccccgatccaactagagccgttagtccgcgctctcctcgccgtcgtacgcgtcgaagtccccctcggccgcggccgtcgcgtcgaccgcctcccggggatcgtcgagcgcggccacggtgatgccgccctccggcttgaacgacacgcccgcgacgagcgccttgatgtgcgccgccggggcgcgcacgccgtcggccttcagcttggccatcagctccggcgggcggaccgcctcgatcttgctcggggacttgggcttcggctcctcgaacatcatctcgcgggggatgccctcggccgccaggacgtcgaaggccgacaccggctcgcccgtcacctcgtccaccaggtcctggcggaaggcgcggctcgacttcttgcgtaccagcttgccaaagcaggcctgaccgcctggggtctcgcgcaggcgccggagcacctcggtcttcgccgacttgatgaatatgtccagcagcgggatggcccgcatccggagcatcaggtcctcgtcgctgtcctcgggcccactttgcaccacggtatcctcggtgaagccgtccccgaactccagggcggcctgggagaaggcctcctcgcgcagcgccgggcacacggccgccgccttgcagaaggtgcaccactcgcccgccctgagcggggcgtcgggctcctcggtggctcgggccgcctcgcgcagcctggcctcgaacgcccgcagggtggccttgtcggtggaccagcgtcggaccttgccatcctggtggcgcgccctgggctggacgatgaccaggtccagggtctcgaaggcccaccggagctcgtgcgccttgcccagcgcgtagtacagctcctggtcgttgtcctccacctcgacgacgacgccctggccgtgcttgtagtcgatgacggagacgtggtcgaagggcaggtacagcgagacgtcgttggtcccgaacatcgggccccagcacaccctgccgtccatgtggaacaggtgccccagggggaactcgtcagtggcggcgtagtggatgccgctcgggctgacgtaggacgggtccttctcccaggcctcgaagtcgaagtcgaagccgatcagccagttgaggctgaactggcgctcgacctccatctcggcgtgcggccccatgcgctccatctcgtcgcgcacggtgtccaggtagacctgcaccgcgtccgccatgtcggcgtcgatcgggaagtcctcgtggcccgcgggcggcagcccgtcggccgaggcgtgcaccgggacggagacgtcggacgccgccacatccagtacggagttggcgggccggtgtaccgtggcttgctcggtcgggtcgaggcggacgtagccacccagccactcccaggcctggctgccgtcgagcaggcaggcctcgccgagcgcgtgcgcggcggtccccagccgtgcggccggggaggagttgttggggcgcccgtgctccattcgtatggagcccaggcagttcatccaccgcttcgcccccgacgcgtttcttaccgcgtggacgcttggcatgtcagttcaccagtgcgagctggatggtggggtactcgaaggtcacgccgcgcaggtcgtcgatcgagaagatcgactcggagcgcacgccgcggccgtcggggtaggagaggaaggtcacgtcctcgccgtccttgaaggactgcacggcccggtcggcctcctcgcggaggaccaggaaggcggtcggctgcggcaggcccttgaaccacaggaccagctgcgcggcgtccttcgggagcttctggttgggctgctcgctcatcagacgctcttcccgtcggccttgtcgatcagcttctgcagggcgtccggcccctgctcggccaggtcgctgacggacttggcgttcaggctggtcagcaggtccatggccgcgtcgttgccctcgatggccgcgtacttcttcagggcggcgcgggcgtcgtcgatggtgaccttcttcttgtcgtccttcggcggagcagcctcgggctcggctgccggcttggcctcctgggccggcggggcctcagcagccttcttggtctcctgcttggcctgcttctcggcggccggctgggaggtggtgcccgggtcggtcagcacggcggtgttgttgatggccgcaccgaagatggcgacctgcacgggctcgccttccacgttcgcgatcatcaccccgttgtcgttcatgtccttcagcacgtcgaggatggcctcgagcagggcgttctgcttcgcctggttggcgaggctctgctccatgaaactgttcacgtccattgcatgtgctccttgttgagcggttggtagggagtgacaatgtaccgtccggtgtccgggcgcggagccaccgtccgcgggcgacggcgccctcaacttagcagtgtgctcgcaacgggttacgacgcaccgcggccgtcgcattatgctcatcccgatgcagccccgagcaacaaccatgtctcactcgtcacacgtatcggatggccccgtgctcgacacacagctgtccgtgcgattcagcaccaaccagaggcgatacctccaggagcagctccggcagctccgcactgacccgaccctgaggcacttcaggtggagcgagtcggacctggtgcgcgccctcatcaatgaggctatgcgcgctagccgccagattgtgccgacccaggagtccgagcagtgacgtcactaaagcgaccgcgcacgggggacatgcgcgcgtacgtagagaacggcctgcagctcatcccgctgcaccggtacgacgcccaggacgccaagggccgccagcgaggcaagaccccgcgggacggcgcctggcaggccaaggagtacgactcccgcgcggtcatcgagaccgccgagcggaccggcgtcaacgtgggcgtccgcctgccctcgaccgtcatggtcctggacgtcgacccgcgcaacttccccgagggccgcgactccctggccgagctcgtcgccgacacgcacctggacctctccacggcgccccacacgatcaccggcagcggtggccaccactactggttcaccaagccggcggacgtcgacctgctcgactccctggaggactaccagggcgtggagttcaagtcccgcggccgccaggtcgtggccgccggctcggtgcacccgtgcgggcagcactacgagtgggacgacctggccccgtcgctcgacgagatgccggagatgcccgccaacctgatgcgcctctgccgccggcccaccagggcgcacggcgaggccgcgggcctcggcgagctcacccccgagatgctggcctccaccctggagcagctggacgcggaggacttctccgagcacgaccggtggcgcgacctgatgatggcctgccaccacgccaccaacggcgagggccggcaggagttcatcgagtggtccacgcaggaccccgagtaccaggacgacgcctggatcatcggccgccggtgggactcgctgcacgccctctcgggccgcggcggccggccggtcaccatcaagttcctccacaaggtggtccaggaggtgggcggcgaggtgacccgcgtcgacgcggccgacgacttcgacacgtgggaggaccccgacgagctcggccagggcgtcgacgacgaggtgctgcgcgccgagccgaagctcgagggcctggcgggcgtgctcgaggagatgaacgagacccactgcgtcgtgatggagggcggcaagttccgcatcttcacggaggagctggaccccgtcctcaagcggccgttcttccagcgctccaccaaggaggacttcgagaacctctactgcaaccagctcgtggagatgcacgacaagctggtgaccaagtcctcgctgtggatcaggtcgccgcaccgccggcagtacaagggcatcatcttcgaccccgagcagacgcacgagggctggctgaacctgtggcgcggctgggcagtgcagcccaagaagggggactggtccctgctgcagcagctggtactggagaccctgtgcgacggcgacaggacctcctacgagtacgtgatgaactggctcgcctacatggtccagcacccgtcgcaggccgccgaggtggcgctctgcttcaagggcgagaagggcaccggcaagggcaccctgggccgcgccgcctcgttcctggcgggatcgcacggcctccagatctcctcgcccgagcacctggtgggccggttcaactcgcacctgcagaactgcatctgcctgttcgccgacgaggccttctgggccggcgacaagtcgggcgaggccaagctgaagcagctggtcaccgagccgaccatcgcctacgagggcaagggccgcgacgccgtgacgggcaagaacatgatccacatcctcatggccgccaacggcgactgggtcgtgccggcgggcctcgacggcgagcgccgcttcgcggtcttccaggtgagcaacaaccgccgcggggacaaggagttcttcagccgcctcaacaggcagatgtacagggacggcggcatccaggccatgctgtacgacctgctgatgcgggacatcgacggctgggcaccgcgggacgacgtgccggccacgtcggccctcgtggaccagaaggtgatgaccatggacgacgtcgagcggtggtggtacaacaagctcctcgacggcatcctcccgaacgcccgcagcgactggcacgagggcgcggtcaccatcatcaaggagcacctccggtcggactacgcggagttcgccaaggaccagagggtgtaccgccccgccgacccggtggccttcggcatgcggctcaacaagctggtgggcggcaggctcgagaacacgcaggtcaagccggcggacgacgactacgcggtcaaggtggaccgcatgggacgcgcctccgcgtcgaagctccccagcctggaggactgccgcgccatgatggaggccaagctgggcagcaagatcgcctggcccaaggacgccctcgactgatccgggggccacggtcggccacggtcggcgggagtacgagccttctgagcctactgaacgccaggctcagacggccgtacgagccgtctgaggcttacggatcaaggacttagctccggaatctgaggcagacggaccgtacgaggctttggctcgatgttgtaccaggaaaaacgacaccgataccatgacggcaccaccaccgagatgcctagacggtccagaacctcagacagttgccgaaatctgcatcaaaatcatagttttatcttatctagatctttttaataaaggtttagattgtataagcctttaaaacagatcttcctgctaaatccactaatctaggctttttgatggacacggccgacacggtccgccctgggcaacacggccggcaaaccggcggggcaattccccgcgatcggtccgaccgtggccgagcccgggcggtggccgagacggtgggcccctcaaaagcctcacgcagaaatcgtccaggcgcggtccccggagcctcgtgcacgaggaaccggcgggtcggccccgggagaccgctggcttactgcccggcctgggcggcggtaccatcggaccattgcaccagcacagcacacggagcgcctagtgagcgtcaagaacatgaccgaggacgagcgcctcttcctcagcgagcggggcccggtctcggagctcgagctcgtcgagtgggagctcgagggcctcaacacccaggagcgcatgtccgccgagcggcgccgcctcttcctgcgggcgttcgcgctccgcggcatcgtcctggacggctgccgcgcggccggcgtgtcccgcggcgccgtggagcactggagggagacctccgagtggttcaacacgatgttcgagatcgcccgcgaggaggcggccgaccgcatcgaggccgaggcgttccgccgcgcggtcgacgggtacgacgagccggtcatctaccagggcatgacgaccacggtcatcgacaaggtcaccggcgaggagaagcagctggtcgtcaggaagtacagcgacgccctgatgcagaccctgctgaagggagcccgccccgacaagtaccgcgagaaccacaaggtcgagcacaccggcgcggccggcggcgtcctggtcatcccggccgccatcgacaaggacacctgggcccaggaggtgcagcggcagcaggccaagtacgccgggaacaacgagggcggtgacgcgcccccgcccgcgggataatcgcagagcagcacacgccgggcgcccaacagggcgccctttccacaccccgagagatcaccatgtcctacgaacccgtacccaccggccgcatgcggctgagagcgcagcccgccgcgggctg

SEQ ID NO: 13 - DNA, 46393 bp, unidentified
  misc_feature 1..46393: note = the genomic sequence of a bacteriophage
  source 1..46393: mol_type = unassigned DNA
acaccgccgaatcttcaatctgagtggcatttcgcgttcaggtttctaattagactgttaagtttagaaattcacttcagatggcgaaaggaaacgggcagaaagtcaatcgcagcgggcttgcagccgtgttcggcgtgtcgatgccaaccgtcgatgcgtgggtcaagaatggctgccccggtataaaggatggcgttggcaagggcggatcgtgggagttcgacaccgccgacgtggcgcgatggctgcaacagcgcgcggccgacgatgctggtggcgccgaggtcgcggacgagaacgcgctgaagcggcggcgcatggccgtgacgctgaaggcggacgaacttgcgcttgcgcgtgatatggccctggtggcgccgattgccgatttcgagcgcgcgcaggcgaagctgttcgcaaagctgcggcagtccatcatgaccgtcccggcgcgcgtcgccatgtcgctggtcggggagaagtcggaaacccgcatcaagcaggttctgaccagcgaacttgccgaagtcctcgcgaaggtcgctgaacttgatttcgaccttgccgacgaagacgaagacgaagacgcgtgatcgacgcagccgacattgtcgacctgaagcaattttcgaatcacgacggggttcgttccgccatgcgtcgcgcggtcgcgcacctggtgccgccgcctgacatcctcccttcgaagttcgccgaagacaacatcgaaatccccatcggcaacgccgtccccggcccgatccgcttcgatgcagccgcgtatcagcgcggcatgatcgacgtgattaaggagcctggcatcacgcgcgtgtcgtacatgctcagcgcgcagttgggcaagacgacgatccagcagtgcattacggcgtacttcgtcgcgcatgatccgcgctcgcaaatctggctgatgccgagtgagggcgacatgctgactttccgcagcacgaagttgcagccgatgcttgatgcgaaccccgacatcgcgaaccgcatggcgaagccgcgcggccgcgacgggcagaacaacggccgcatgatttctttcatcggcgggtggctgatgttttcgtgggccggctcggcgaagacgctgcgcggtcgctctgcgccggtcaccctggcggacgaaatcgacggcatggagaacgccggaaccgaggaaaaggacgaaggcgaccccgtgcagttgctgatgcagcgcgcggcatcgttcagttcgtcgggtcagaacctgcacatcgagtccagcacgccgaccgtgaagggctttagccgcatcgagtccagccacgaccagggcgaccaacgcaagttctggattccctgcccgcactgcggcgaacgccaggtgctgaagtgggataacgtgacgtggcaaggccgccaggacgaccgcgagaaggacgctgcgttcagggaccacgaagtcgacacagccggctatatctgcgaccactgcggcgtcgtgtggagcgatggcgaccgcgtcgcggctgtccgcgatggcgtgtggatcgcttcgcagccgacgaagaaccacgcgtcgttccacttgtctgaactgtattcgccgtttcggaagttgcgcgacatcgtgcaatcctaccttgataaactggcggtcgacagttggaacacgtttgtaaacgtgtcccttgcagagacgtacgaagagactggcgacaaggtcgaccccaccggccttgtttcgcgcgctgtcgagtacgtggcggaagtccccatgggcgtcctgtacatcacggccggcgtggacatgcagcaggaccggctagagtgcgaaatcgtcggatggggcgaaggcgaacagtcgtggtcactcggctaccacgtcctatggggcgaccctgtcggtggtgacgtgtgggacgacctggaagacctactagagaccaccctgtctcacgaaagcggcatgcagatgcgcgttcaggccgcctgcgtcgacactggcggcaccagcggcatgacgcaagcggcgtacgactggctgcgcgggaagacgggccggcgcctgttcggcatcaagggcgtacccggctggggccgccccatcgtggagaaagtggagcgcaagcagtcaggtaagaacgcgcgcaagatcgacctgttccgcgtaggcgtcgacgaaggaaagttgatggtgatgcgccgcctagccgtgcagaaggagggtccgaactactgcaacctgccggctggacggttcgaccttgaggaatgggcgaagcaggcgaccgcggaaaagctgcgcgtgaagtacattcgcggccaggccgttcgctactggtggaagcccgacaaggcgcgaaacgaggcgctagattgccgggtgtacgcgaccgcagcgctcaagatcatgcagccatcgtttaaacggcttgcaatcaggttgaatcagttcgtggcacagaaccccgacgccgcgaagcttgcatcgctgcaaaaggtcgtcgacgtggtgaagcaagttgcggccgctgtcgcaccgaagaaggcggcggaaattccgcaagtgtcccaacccgaggaagcaaagcagactgtgcgcgttcacaagaccgcggcagcgcgccgtgccgggaaaaattgggtgaatagctggtaaccgtgaccatccttccgaccaaaattcaagccggcgaaaacttcgccgcttccgtcgaacttccggcctattccgatgggtgggtggttcgtctgtcgctgcgtgggccgtcatcggtcgatatcgaggcgacgcagaccgggagcgtgttcgttttctctgcttcggcggcggaaacggcggcgtgggttgctggcgaatactcgtggttcgtgcgagcgatcaagggtgacgacgcgttcggtgttgcgcaatgccgcgtcaccgtgcttcccgacctggcgaacgtcgatgatggctacgatgcgcgcagtaagtggcaaaaagggcttgaagcaatcgaggccgtaatcgatagccgcgcgacgaaggatcaagagcgctatcgcatcaacaaccgcgaactgtaccggacgcccatcggcgacctactgaagctgcgcgcgttttacgcgcagaaggtccgcgaagagtgctgcaccaacggcggcgccggccgcttccgcgatattcgcgtcggcttcggccccacccgctgacaccatgaatctgatcccgtccattttccgccgaaagaacgattctgcgccgagtcctgcggcgccgctgaagcagtcgcccgcgcgatccttcacaggccgcgcgctggacgctatccgcatggtgttcaactccgcgagcgtcaaccggttgaccggcgactggggcaccgagccgcagccggccgactggatcatccatcggcactggcgaatcctggtcgcgcgctcgcgcgaacagttgttcaacaacgattatttcaaggcgtacgcgcgcatttgcaggcaaaacatcgtcggttcttctggcctggtgttccagtcgaaggcgcgcacgtctggcggcaagaccgacaagaaagcgaaaatcgcaatcgaacgtgcgttccgcgactggtcgaagcggaagaactgcgacgttgccgggaagctttcgtggcgcgggttcttgaaccactgcgtgcagtccgccgttaccgatggcgagttcatgctgcggaagtacgtcggccggcaatatggcaagtacggatttcagttgcaggttttggaccctgtgcgctgcgccgtcgattacgaccggatggggctggacggtggcaacttcattcgccacggcatcgaattcaacatccttggcggcgtggtcgcgtatcacttcaccgttgcggccgcaaaccgttcgtccgatgcttacagctacgccggacgctcgttcatccgcgtacccgcgaacgaaatcatccacggtttccgagtggaaattgcgcagcagaagcgcggcctaccgtggctgtccaccgggcttttccgcatgaagcagatgggcgcgttcgaagacgcggctatcgtgaacgctcgcgtcggcgcggcgaaactcggtgttatcgagtggaaggagggtgaaggtccggaatgcaatagcgcggatgatctggatgaagtgccggaaatctccggtgatccggggacgttcatttcgttgccgaacggcgcgtcgctgaacaagttcgaccccacgtatccgtccggcgagttcgccatcttcatgaaggcgatgcttcgcagcctggcgaccggtggcggcgtgagttaccacacgctcgcacaggacttggagggcgttaacttcagcagcattcgacagggcacgctggacgaacgcgagcacttcaaggaaatgcaggaatggctcatcgaagaggctgcggaccccgtcaccgaaacgtggtttgaacaggccatgctgcgcggcgcgattgtcaccgacaacggaacccccctgcccgtttcgaagatcgaacagttcggcgactacgaattccagggccgtcgatgggaatggatcgacccgaacgccgacatgcaggccgccgaaggccggaaaaacaacctactcgcgtcgccaagtgaaatcatccgcgaaagcggccgcgaccctggcgtggtgttccaggaaatcggcgaagacatcaaggcgatgaaggcggccgaaatccccgacgaagtcatcatgatggcgatgggccagaaacttaccgcacccgcaaaaccgaaagacaaccaggccaatcaaaatgcagcataagaccgcggcgcttctgcgcgccattcaggcatccggcctggtcaccaggtccgcgccggacgcatcgcagcgactgaaggaagtgcacgcgcgcgccgctggcggcgtcatccatcgcgccgctgaagtcttgagcatcgacgaagcgtcgcgcacggtcgaactggcgttttccagcgaggcgcccgtgaatcgctggtggggcgaggaaacgctgtcgcacgacccctcgcacatccgcatgggccgcctcaacgacggcggcgcgctgctgtggaatcacgattgggacgaccagcggggcgtagtggaaagcgcacgcgtggacggcgaccgcaagggccgcgccgtggtccgcttcagcgaaagcgaggacggcgaggaactgtggcaggacgtgcgcacgaagatcaagcggcacgtatcggtcggttacttcatccatgcgatgcagcttatcgaggtcgtcgacggttacgaacgctggctgattacggactgggagccgtacgaaatcagcatcgtgagcgttccggctgatacgactgtcggcgtcggtcgctcggcggaaattccgcaagtggaaaccggcgatgctggcgtggagaatccgcaactgagttctaccgttaccaatcccgaaacccggacccaaaaaaccatgttcgaaaaaatcacccgcaacgcggccggcgacctgatccgggcgaaggtggatgccgaaggcaacatcgtcgagaccctggaagtcatcgagaaggccagcgacgcgcagcgtcaggcgacccagcagggccaggccgccgagcgcgcccgcgtgaacgaaatcgccgcactggccgagcgcttcaagaagggcgttccggacggcgccgcgctggccgcggtcgcgatcaaggaaggccgcagcgtcgccgaatttcaacagcagatgctggacgccgtcgacaagcgcatgacgacccccatcgaccagcaggataccagcgccgccgatgtcggcctgagcgagcgcgagatttctcagttcagcctgctgcgcgtggcccgcgccctggcgaaccccggtgacgtgtcgctgcgcaatgcggccggcatggaattccgtgcatccgaagccgcggccgagcgctacggcaaggacggcagccggttcgtcatcccgaacgaagttctgcgccgcgcagtcggtggcgaattcagccgcgccgcgatttcgaccagcagcaacgccaacggcaacggcggcctgaccgtcgacaccacgttggcaaccggttcgttcatcagcctgctgcgcaaccgcgcaatcctgctgcgcaacgcccgcacgctcggcggcctggtcggcaacgtcgacatcccgaagcagaccggcggcgcgtcggcgtactggatcggcgagggcgacgacgcgcaggaaaccggtatcgaacttggcatggtgtcgctgaagccgaagaccgtcgccgcgttctccgacatgacgcgtcgcctgctgaaacagtcgagcatggatatcgaggcgatgctgcgcgacgacctggcaatcgctctggcgctcgccatcgataaggccggcttctacggcagcggcagcgaataccagccgcgcggcctggcgaactacgacggcctgaacgcggtggtgctggccggcgactacccgacctatagcgaagcggtggacatggaaaccgccatcgcgctggacaacgccgacgtggattccatgcggttcgtcggcaacgccagcctgcgcgggtacgcgaagaagacgcttcagttccccggcgtgaacggttccgcgaagctgtgggagccgggcaacaccatcaacggctacagcgtcgacatcacgaaccaggtcaacgcgggcgacacgttcttcggcaactggaacgacctggtgtgcggcatgtggggcggcctggaaatgaacgtggacaccgccgcgctggcgaagtccggcggcgtgcgcatcatcgtgttccaggacgtggacttcgtcctgcgccgcgtcgagtcgttctgcgtcgcccgcaaggcgtcgtaaccatctgcatgtgagcgaggccgctacggcggcccgctcttgcgaaaccggagatacaggaagatggaaactgtgttgatgaagctggtgggtgcaatcgtggtcggcggccaggttgtttcgccgcccgcggtcatcgagtgctcgccggccgaggctgcgaactacgcgcggcgcggcaaggccgtcccggcaaccgatggcgatgcaccgagtgccgtcaccccgagcgccgagcacgtcaaggccaccgccgcggaactgcgcgccgccgccgacgccgcggccgaagcgctgcgctccgctcaggcggaagcagacaagaccgaaggcaagacgcgcgcacagcgcaaggtcgacgccgaggccgtggacgcggcgaagctggcggccgaaaccgcagaagcggcagcggccgccgcggaagcggccgaaaccaacccctgacccacaaccaaggaaaaccgcaaacatgttgcgcggactgaaacccaccactctcggcaccaccgcaatcgacgcccgttcgttcaaggggcatgcgctcgtcctcctggcgcgtggctccgcaaccggcaacctcgccctgaccatcgagcacagcgacaacggcacgtccggctgggcgacggcgcaggccgtcacgttcagggccggttcgaacctggccggcgccgaggcttacgccgaaatcgatatggacaagttcaagcggtacatccgcaaggcttcgacttcggtcggcgacttcgccgcgctggtcgcgcaggtggacggctactaatgccgtcaccggagtgggaagacctggacgtttttttcgacgacttcgcgacgcaagttgcgttctcgtcgccgagcggccaggttctccccgtcttccgggccatctttgacgatccgtatttcgacaagcagctaggcgagtacgtcgccaccgatggcgacccgcgcatcacctgcaaggaagtccacgtgttgcaggtgaagaagcattacgaatgcaccatcgcaagcatgcctgggcgcaaatacacggtgatccacgacccgaagttcgatggcacggggacgtgcgtcgtttacctggggcgcatcgagtgatggtgtagcgcgtggctagtatcagcatcgacattgacggccggggaattgattccctggccgcggcgtttggagcgaccgaaagccaggtccgcgccgcgatgcgttcgacgtacaacaaaatgggccgatggatgcgaacgcagtcggtccgcggcctgtcgtctaagctgaagatccagcagaaaattttgcgctcgcgaatccggtcctaccgcatgcaacacggcatggaggacggggaaggcgtaaaagtgtggtacggcatcaaggaaatcgcgttctcacgcctgaacccccgcgagtccgggaagggagtcaaggcggccggcggtcgatttgaggaaggcgcgtttatcgccaggctgtacggcaaagaccaagttctgaagcgcatcggcaaggaacgcgttccgctgcgcgtggtgtatgctgacatcgcggacgaagccatcacgtacattgaggacttcgttatcggcacgactgcgttcgacgtgcagttttatcgcttccttgagcacgaattgaaatggcggacatcgatcctgaagtaaatttcgacgacctgcacgacgcgatcaaatcgcgtatcgttgcggcgtttcccgatttccagaccgtcgagttctatcgcgacgatgaggacgcgctgttcccgacgccggcatgcctgctggcgatgaccgaggccgagccgcagccggacagcgacgcaggcgccgaacagttgccggttctgctgcggttcgaagcaagtatcgtgatggcgcaccgctcgccagccacccacaaggccgtgcgcaaatcggcactagccctggcgacctggctgtataagttgaagcgcttcccgccgtgcgatccggtccaggtgatcgcggtcgagccggacgaatttgcgccgaaggccgacaagttcgtgacctggcgcgtagaattcgtgatgctggggttcttcggcgaaaccgcgtggaagaacgacggcaccgtgccgaccgatgtcatgttcagttggtcgcctgaaatcggcgccggcaacgaagacaagtacgccaacgcagcggagccgctgccgtgagtgctgaccacgaccgacgcatcggcaacctggtgatgatcggcgtcatttccgcgcttgacgaagcgaacgcgctcgcacgcgtcgatgtcgatggcctgattaccgactggctgcacttcgcggccctccgcgccgggcctggcgtgcgcgagtggtccgcgccagaagtcggcgaacaggtggtcgtggtttcgccttacggcgatccgtcgcaaggcatcatcgtttgtagcgtgtaccaaagcgcctacgctgcgccggccaacgtcaagacgaagcatcgcaccgagtttgcggatggcgcgttcatcgagtacgaccgccaggcgcacggctacactgtcgaagttccggccggaggcgcgatcacactgcacatcggacagacgacgctcaagctgcaagacggacaggcgacgctcacgacgccgaaacttgtcgttgactcgccagacagttctttcaccggcaaggtcaccatcgctggcgacacgaccattaacggcgcaactgccgtgaagggcatcaagtcgaatggcgtcaacatcggcagcgaccacaagcacagcggcgtgcagccaggaagtggcgtgaccggcaatcctcagtaagcggaaattccgcaagtggccgcgcaacgcggccacgtccatcatcgcaatatgattgggaccagtgcggccaccggcaaattgctttccggaatcgaccatcttcggcagtcgatcacggacattttgacgacgcccatcgggtcgcgcgtaatgcgacgcgactacggcagccgcctgttccagcttgtcgacgcgccgctgaacctttccacgggcatggacttaatggcggccactgtcgaggctttggagatttgggaaccgcgcattcgcgtcaccaaggtgacgccgagcgtcaccgctgccggtggcgttcagatcgcggtggagggcgaatatctgccggacgggcaaatcatcgtcattgacggaatcgtggtgaaataaatggccggcgcttttaccaacgtcaacctttcccaactccccgtccccgacgttgtcgaacagatcgatttcgaaacgatcctgaccgacatcctcgcggacttcatcgcgcgcatggctgccgctggcgtcacctataccgcgctggtcgagtccgatcctctttacaagctggccgaggctgccgcgtatcgtgaagtgactatgaggcagcgcgcgaacgagtcagcaaaagccgtgatgctttcgcaggccatcggtagcgacctggatcaacttggggcgaacgtcaacgttcagcgcctgctcgtcaaccctggcgacccgaacgcggttccgcccgtgcctgcgacgtatgaaagcgatgaagacttccgcgctcgaattcagttgtcgttcgaaggctacaccaccgcgggcagcgaaggcagctacgtgttccacgcgctatccgcggatggtgacgtgaaggacgtttcggctatcagcccgacgcccggcgttgtgcgcgtctacgtcctgtcgcgcaccggggatggaacggcggcgccatcgcttgtttcgaaagtcgatgccgtgctgaattccgaagacatccggccgatgaccgacaacgtcatcgtttcctccgcgggaatcctgccgttttcggtgcaggccacgctcaccatgtatcctggccccgaccccgaagtaatccgtcaggcagcaatcgcagcgctgaacaaatacatcgtgagcgtccagcgcatcggttacgacgtgacccgtgccggcatcatcggtgcactggtgcagcctggcgtgcagaacgtcgcccttacactccctgcggccgacatcgtcgtgagcgacagccaagcgccatactgcaccgcggtcaacgtcagcaacgcggattccccgaatgtctgacaccctgcttccatctagcgcgaccgtaattgaacgcgcaatggagttagcggccgcccgcatcgagggcgtcgcaacgcctgcgcgttacatgtggagtcctcagaacgcgcccgttcaaatcctgccgtggctggcgtgggcgttcagcgtcgacacgtgggatacgacgtggaccgaggcgcagaagcgcgcgaccatcgcggcatcgtacagcgtgcaccgtaagaagggcacgattggcgccgtgcgtcgcgcgctgtccgcgctggggcttggcatcaccatcgttgaatggtggcaggaaacgccacagggcgatccatacactttccgcatttcggttgatgtcgaccagggcggcgcacagcagggtgcgctgtcgaaaattatcgaagtcctcaacacttcgaagaacctgcgttcacacctgaattccgttgacctcactgtgacgacttatgcgacgccgtttttcgcggcggcgacgcttgtcggaaccgaactgaccatcctccccggaacctgatacatggcaacttaccgcaccatcctcaccaagaagggtaaggaactgatcgccgctgctggcgcaagcggcatccccatcgtgctgtccgatatggcggtcggcgatggcaacggaaacgccgtcactccggtggagacgcagaccacgctcgcgcgcgagcggtatcgccacgccgtgaatcagttgaccgtggacgtgagcgacgcgagccgtttcaccgctgaattgctgatcccggcgagcgttggcggattcaccatgcgcgaggtcgggctttacacgaacaacggcgacctgttcgccgtcgcgaacgtgccggcgtcttacaagcctaccgataccgaaggttcgttcggcgacactgcaatccgcatggttttcatcgtcgcgaacgcgtccgtcgtcaccctggtggccgacccgaacgtggctgtcgcgacgcattcgtgggtgatgaacaacgtcaacgcggcgacgatcatccccggcggcctgacggggcaattcctcgcgaagaagtcgaacgcgaacggcgatattgattgggtggacccgacgcagggcatcaccgttattgtgttctcgcgcgaggaaactcagacgctcgccgctggtcagaccgttgtcgacctggcgcaaatcaccgccgagggcgtcgcggtttacatcgagggcaccaggttgcgcgccgccgagttttctgtgactggcgattcgcagattacgctcgcgtccgcgcatcccgcgggttcgaaggttaccgccgtgcaaaacgaagaggtaggcgctaccgatgttctgctgcgtccgctgaatttggcggacgtgccggacaaggcggtggcgcgtaacaatctcggccttccgaactggctcgccacttccaacatcaattggaaccagttgattaacgtccccgcgtacgcgttgcgctgggccgactggtcggaggtcacgaacaagccgaccaccttcccgccgagcgcccatagtcaggactggtctaccatcgacggaaagccggacaccgcgacgcgctggccgacctggaatgaggttaccggcaaaccatcgacgttcaccccgtcgacgcacacgcacgctatttctgacgttttcgggctttcggatgcgctcaattcgaagctcggaaactccgggaatcagtcccttgccgggtctctcactcttccgccggttgctggccttccgatttcccccgatggcgatgcggccaggcagttgcgcaccgagtggcaaggcatcgccggctctgtcgaatacctttctgtcaatttcgtccgcaaggcatccggaacggattggcaaactgctgcgtggcgaatccaacgccaagttggcggaaccgctgtcggttatatcgagattggcggaaacaatgaatccaagtcggtagttctcggcgcctacatttccggtaccgcatggctcacgaaccaaggggcatggggcgcgtccggcggtttcgatttcggctcttccaggaaattgaagttgattgagggcgaaatgccctacggtcttgagcacgtacgcaaggtttcaacgctgatcggaaaatacaagccggagtacaataaggatgggcgcacccggcttttcttcgacgccgaacagcttgcgacgatcattccggaagctgttgatgaaaatggcgttgagttcaatggcgaaatggtccctgttgtaaagatcgaccaggttctaccgcctgcatatcgcgcaatctctgagcttgcggaaatggtggaaaacctttcacgcgaggtcgctgcactgaaggcgggcaaatgatatggcttcaggatatagaagcaacaacgttgattttgacgacctattcgaacctgaaagcaatggtaacggaataacactttcaggaataaggaaggatggcagcgggcttaggtacgcttctcgcggaagcactgcgaagcgcgatgatgtcggatatcgcgtggacggtcaggatgtttctaacgtctggatggctaagggcacaacgacagtcgttcgcggcggcgtccctgacaatatctcgcgatcccgcgccgcgacgcagaaccagcaggtaacgctaaacgcgttcctgacttacgaccgtaatgggtcggtttcgtggggcggcggcggaatcggcacttcggggagcgggcaatggatttccaacgcatcgtcaaccgttggtgacaattacgacatcaatgtatcgaccacttcgcagagtggcgacggcacgctgactggttcaaacaccggttggcagcagatgagcgtatcgcgaagtgtgttgcttcagacgacgacaacgaacggcgacaggttcggcactgttggcttgaatgttcaaatcaggcggcgcagcgataacgtggttctgttgaatttcaacaccaacatgaccgttcagatttccaattccggttaacagaaaggattatgggccaggtactcgatttgtacgaaaaactgaccggcgttgttttgccttacgccggttcctccgcaccctccggtttcctgctgtgcagcggccaggtggtcaacagggcggattatccgaacctgttttcggtcatcggcacgacgtacaacgtcagcggcgagacggccgcgcaattccgtttgcctgaccttcgcggccgcgtcccggccggcgtcgacaacatgggcggcaccgcagcgtcgcgcttgacgacggcgggcagcggcctgaatggcgccacgctcggcgcggccggtggcggtgaaacgcacacgctgaccacggcgcagatgccgcagcacaatcacggcgtcaacgatccaggccacatccatagcgcaaacgttcgtctcggtacttcaacgtccggcggaacgtacccgtacggcggcagcgccgacaacaacacgtatttgaacaacaccggaaattcaacgactggcatctcgatccagaacaacggttcgggccaggcacaccccaacgtgcagccaacgctggtgatgaactacattattaaaacatgaacgaaagcattcgcgttacggcggcctgggccgctggattcttcgaaggcgaagggaccgtccgatttaacaggagccgccacggcggacctggcacaatcgggcttcagatcgtgaacacagaccttgcgatgcttgcgcgctttcacgaagcgacgcgttgtgtcggcaccctttccgggccgcgcccgtgtcgtggcttggggaggaagccggtctatacgtggtatgtgaataggttcgaaggcgtgcagttcgtcgtcgcgatgctgtgggaattcctgtcggaacgcaggcggtcgcgcatcaccgaacattggcgaatcccgcaggcgcagcgccgcaagacctaagcggaaattccgcaagtggaatggccgcgttcgtgcggccatcatgcgcacagaaccgtatcacccaccggacccatcaaacatggcaaccgatttcctgcacggcgtcgaggtcgtcaccatcgacgacgggtcgcgaccgatccagaccgcaagttccagcatcatcggcattgtcggcaccgcgccgcgtgccgacgacgaagcattccccctcaacgttccggtgatggtggccggctcgcgcgcgctggcggcgaagctgcttgccaacgcagccggaagcgacggcgacggcacgctgccggaagcgatggacagcattttcgaccagaccggcgccgcggtgatcgtcgtgcgcgtcgcggagggcgccagcgattccgaaaccctggcgaacgtgctcggcggcgtcaacgccgtgaccggcgcatatgagggcgtgcacgctcttctggccgccaagtccatcaccggcttcaagccgcgcatcctgatcgcaccggggttcacgcaccagcgcgtccagggcggcatcacgggcgtgaccctgagcaaccagggcgctggctacagcgccgcgcctgccgtctcgttcacgggcggcggtggcactggcgcgatggcgattgcggttctcggcaccggggcgaacgctggcaaggttgtcgcgatcaacatcaccaacgccggaagcggctacaccagcgccccgaccgtcgtcctcactggcggcacgccgacgaccgcggccgtcgcgaccgcggcgttcggcaacaccgcgaacgccgtcgtcgcggaactgaccggcatcgccgaacgcctgcgcgccgtcatcgtgcaggacggcccgagcaccaccgacgccgccgcgatttcgaccgcgggcgactccggcagcaagcgcgtttacctggtggacccgcgcgtcctcaagaccgacagcgccacgggcaattccatcgcggcgtattcgtccgccgtggtcgccggcctgatcgccaagaccgacaacgaaatcggctggtgggcgtcgccgtcgaacaaggaaatcaatggcatcatcggcaccgaacgcgcggtggacttcgccatgggcgacgtaaacagccgcgcaaacctgctgaacgccgagaacgtcgcgacgatcatccgcgaatcgggtttccggctgtggggcaatcgcacgctgtcgagcgatccgaagtggcagttcctgtgcgtcgtgcgcaccgccgacatcatcgccgacagcttgcaggatgcacacctgtgggccgtggatcgcggcatcacgaaaaactacgtcgaggacgtgcgcgagggcgtcgcagcgttcctgcgcgacctgaagtctgctggcgcgatcttgggcggcgaatgctggctggacccggacctgaacagcaattcggcgatccagaacgggcatgtttactgggatttcgacttcacccccgtctacccggccgagcggctgaccttccgttcgcacctggtcgacaactacatcaccgagattttctgacatggccgcagcgcgcaacgttcgcaagaatatcaacctgtacgtggacggccgcgggcaggccgggcaaatcagcgattacaacgcgccgaagctgacgctcaagaccgaggaatatcgggcgggcggcatgcacgggccgctggaattgaccatggggcacgaaaagctggaatgcgatttctcgctgatttcgtacgacccggatgtcatcgccgggtacggtgtcgccgagggttcgcaaatccagttcactgcgcgccaggccatggagtcgtacgacggcgccgttaccaccctggtgcacaacatgcgcggcaagatcaaggaaatcgaccccggcaccagcaagcccggcgaggttccgacgctcaagatcaccgtcgccctgtcgtactacaaggaaaccaacggcgtgcgcgtcatccacgaaatcgatgtcgagaacatggtgttcgtgaaaaacggcatcgacgttctggccccggttcgcaacgcgctgggcatctaagcgacgccgcagcgcaatcaagtcgcgaggggttaaacccctcgccttttacatcaaccacggaaaattcagaaatgagcgaaaagagctacctctctgccagtggcgacaaggtcgtcatcaccctggcgcgaccggcaacgttcgacggcgcgcagcgatccacgctgacgatgcgcgaaccgctggtgcgcgacctggaacagtcgcagagtgcggcgtcgagcgacgcggcgcgcgaaatccaactgttcgcgaatctgctggaagtcagtgcagacgacctccgcggcctgggcctgcgtgactacaagcggcttcaggaagcctacgagcgtttttccgactgacgcgcgattacatccgggccggtgtgttggcgttggcgtcgcacaccggttgggctgaagccgaaatcatggctttccccgcgtcgaaattcatttggtacttggaaggtctcccgaaggaaactgattaatggcgtctaagaccctcaaggccagcgtactaatcggaggctcggtttcgtcgagcctccgcgctgcgttagggtcgacgcaagacggtctgaagaagatcggccaagcgatttctgatgtcgagcgcaagcagcgcctgatggggcagtcgatccaggtattcggccgccaggggaagaacgtcgatggcctgcgccgtcagtatgaccagcttacgcaggcggccgaacgcctgcgcgcggcacagacccgcctcgccgctgcgcagcgcgcggtaaacagcaacatggagcgccgcaaggcgcttgaaggcaagatgactggcgcagtcggggccgctgtcgctaccggcttcgccatcggaaagccagtgctgaacgccgctgcgttcgcgcgcgaaaaccgcctgatcggcaacacagcgaacatgagccgcgaggaagtcgccgcgcttggcgcgacgatcctgcgcgagtcgcgcgtgacgaaccagggcgccaacgagctacagaaggcaatcggcttcctggtcgcggccggtctggacgtgaagactgcggaagctagcatccgcactattggccgcaccaccaccgcggccggcgccgatatcgaagacctttccaaggcatcgtttaccctcatcgacgcactgaagatcaagcccgatggcttgcagggcgcgctcgatatgctggcgctcgccggcaaggaaggcaacgtcgagctaaaggacatggcacgtcagttgcccgtgctcggcgcgtcgttcgtcgcgctgaagatgggcggcaccgaggccgtggctacgatgggcgcggcgctggaaatcgcgcgcaagggtgcaaaggacgccgacgaagccgcgaacaacatgcagaatttcatggtgaaaatgatgtcacctgaaactttgaagaaggcgcagaagaatttcggaatcgacctatacgcgattatcaccaacgcgcagaagaagggggcaaatccctttgaggctgcgatgcaggcggtgatgaaggcgaccggcggcgatcaaaagaaaatcggcgaactgttccaggacatgcaggtgcaggcgttcttgcgcccgatgatccagaattgggacgaatatacgcggatcaagaataaggcgctgaaggaggcggcgggcaccactgatcgcgatttcgcgctgatgatggagcaggaagccgagcagatgaaagcggcgaagatcgccgccgacaacatggcgaagacctatggaaaggtgttgctccccgccatcggtgacgctgccgggaaattcgctgtcgtgttcgacaagatgacggctttcatcgacgcgcacccgaaacttgtggtcggcgcaacgaaggcagtcgccggcatcgtcggcttgcgcgtggccgcgctcggcctgggttacgcgtggacgttcgttaaggggccgattctccaagtgtcggcgctgatcgcgcgcttccgcgctggtggcctggtggcatccatgggccgcctcgcgcccctggcgctgcgcgttgccggcgcgttccgatgggttgccatggcggcgggggcaatcggcggcggcccaattgcggccgctgtgggcgccctggtggttggtgcagttgtcgtgcggaagtattgggagccgatcaaggcgtttttcggcggcctgtgggaaggattcagcgcagcgcttacgcccgcgatgcaaggtcttttctctgcgctcacggaactgaggccggcatgggatgcggtgtccaccgcaatcggccaggcgtgggactggttcgtgaagctgatcgaccccgtttccgccagcaaggaagaactcggccgcgccgcgcaggtcgggcgcgtcttcggcatcctgatcgcgaacagcatccgtattaccatcaacgtgctgtcgaccgtaatccgcacggtcgtcactgtcgggaccgccttcaacgccgtttcccaaaccatcgtcaccgcgtggacggatgcgtggacccgaattcgcggcgtcgtcgaaaccgctgtcggatttatcctcaaggcgatggcgcccgtcaccacggcgatgtcgtggatttccgacaaggcgaatatcggggcgaacgtgtcgggctggtttcgcgacacggggcgatccgcgaacgatcctgttgcagcggccgcggccactggtggcaacgtcccggcgctgccacaggtatcgcagcgtgcgcgtagcgcgacgccgaccgtcaatcagcaaaacgtgtaccatatcgtgcagcagcccggcgaatccgccgaagcgctcgcgcgcaggattagcgaggcgcagcgacgcgaggctgccgtacgcgaacgcggatcactggcggacaagcaatgagttttatcgataacctgcgccgggacatcgcgaaccggctaaacaaagtcctgaccagcaggacgggcaacgcgcccgttatgatgatgctcggcgggttcaagttctccgttcgcacagcggcggcgcatgaggtttcgcgccgccgcggtttccgctgggcagcgcaagagcgtttcgggaacgtggatgcgctgcaattcaccgggtacaatgaggaagtttggaatttcgcatgcgtggtttatcccgactggcaagggataaagtcgactgacgaaatcatcgagattgcgccggagaatcgcccacttaagttgatttccgcgagcggcgatatcatcgggaaattcgtcattgtcggcatcgaagagacgggttcgtatttcaagaccgatggcacgccgcgcaaaatcgaattcaacctgaccatccgggcttacgaatgatggagtacatcacaaagcaacgcgacgtactggacgacatcgtcagccgtcaatatggaaacggcgcatggagcgtcgtgcaggccgtgctcgccgccaaccctggccttgcggataacggccccgttctcccggccggcattactatcgtcctgccagtcatcaacaccccgtcgaccgaggtcaaggcggtgtcgctgtgggattgacatacctcccgcagttccgcgtattcgcgaacagcagcgaaatcacggaagccatcgcggaccgcctgcgcgcgctgcgcataacggatgaggccggcacgacttcggacatgctggaaatcctgcttgccgacaacgacccatccgcaccgattgccatccctccgactggcggcgagcttgaggtttttttagggtacaacggcgcgctgaagcgcatgggcctgttcatctgcgacgaaatcgagttgagcggttaccctggcgaaatgtccatccgcgcgcgcgctgcgccgtatgaggaaagcaaggaaggcaagaccgacctacagacgcagaaaacgcgcagttggaagaaggacaccaccatcgggtcgatggtgaagaagatcgcaggcgagcacgggatgacggcgtcagtgtcgccagacctcgccgcgatcaagctgccgcacgaagaccagtcgagcgaaagcgatatgaacctactgctgcgcctggcgaagcgttacgacgccatcgcgaagccagccggtggaaagctgctgttcgtcaaacgcggcgactccaagacggcgagcggcgcggatatgccggcgtttacgctgacgcccgacatcacgacggatttccgcgtcgtcatggcgacgcgagacagcgccgggaccgttgtcgcttactaccgcgacacgggcatggcgaagcgcaaacaggtcaaggtcggcaatggcgaacccgtgcgcaggctgcgaatggggtatcgcgaccaggctagtgcgcttgaggctgcgaaggcggaacagcgcatgcgcgcgcggggggagcacaaaatcagcgtcaacacgccaggcgacccgaccatcgccgcggaagcgatgatgacgatgcagggctaccgcgacggcgtggatggcgaatggctggtgacgcgcgtcgaacactacttcggcacggcaaccggctatcgctgcaccatcgagggcgagattccgaacaaggacaaggacgtgtcggacgccgacagcgatgtcgaggacgaagaccaggacggcaccgaggaaggcggctgaacgtgaagcggcgtgcgaaatcgtgtggaaaagttagcggccgtgttctcggttgaaagtgcacccaaaggtgcacccacgctgttttttgaggttcgctaaaatcgccgtaagcagttgattttgttgatggagcgggtgaagggaatcgaaccctcgtattcagcttggaaggctgtccccacgttataatgcacgttcacggtgcgcaatccggcgtcacgttaagccattgattcacaacactgaattgacggctgaataggaatgcgcaagtgatttcaaagccgcagccgcggcgatgatccgaccccgaaagtgcacccagggacacccatgcttacgccttcgaagattgatgccgctatcaagaaatgcaccagcgaaacggtgctgaacgacggttctgccggccgcggctccggcagcctgacgctgcgaatccgcgtcggaaccaggatgaaatcggcgacgtggatcgccacgtggaagcgtggcacgaagcgcggaaagaagccgctcggccgatacccgacgatgacgcttgcgcaggcgcgcgaggaattcaaggtcgtgagcgcacagattgccgccggcaagaacccgcatcgccaggccgtgctagcgacgatgcgaccgaccgtcgaggcgttgtttacttcctacgtcgcgcacctgaaagcgcgcagcgcgcgcgctgccggacacatcgagcacgtgctgttgctgggcaagcacaacgcagccgacgcgcttggccgcgacaccctggtggctgacgtgacgccgaccgacatccgcgcaccgctggcggccaccgcgaagcgtggcgccctgcgcacggccgacatcctgcgcacatacatgtccagcgcattcggctggggactgaagtcggcgaacgactacaccaccgaagacgcgttcgactggggtatcacggcgaaccctgtcgcggccgtgccgaaggacgccagagcgaacaagcgtcgcgaccgcaatctgtcgccggccgagttgcgcacgttctggcgcggcatcaacggcggcccatctggcgacgcaatacggctgatgatcctgtgcggccagcgagtgcaagagacgatccgcgtcgacggttgcgaaatcgaccttgaccgcgaactgtggatgatgccggccgagaagacgaagggcggcgagcacccgcacacgatcccgctgccgcgcggtgctgtcgagattttccgcgttctgaaggagcttcacggcgacggcccgctgtttcccgcgcgcaccgggtcgaagcgcgaccgcatgggcatgctggccgtgagccactctgtcgcgtcgatgacgtgcgtgcgtgatttccaggcgcgcgacgtgcgccgaacgtggaagtctcgcgcgcacgacgccggcatcgaccgctttacgcgcgacttgatccagcagcacgcgcgcaacgacacggggtcgctgcactacgaccgcgccgactaccttccgcagatgcgtgaagcgatggtgaagtggcagtcatggctagatgaacacatcattaatgaaccattgagttcagttgacgatgatattcgtaaagccgcatgattaaccaatggcagctacgcagtagatgagtggcgagccgggacgatcaagcagaagtaacgcaggcttaaaacttcagggcggcaatatgctacgcggttaggccattgcagcgccagaaacggcctaaacatcgcccgccggggccaaacgtcgcgcggagagagaccgacaatccacggggatgcaaggattccccgatctaaatttaacgccagcacccgcggactagcggggtcgtttgcccgatagatcgctggaaggatcgggaccgaagtcggcacaggaaataagtggcgttggtatacgtcaagcagccgataaacacccgcgtgcctaccggcgatacggtggttctaattcgggccggcgcattgcgccacccacaagtgcatagggtccgtggcgagcgttgcgccatcaacgacggatgaccagggcggtggccctcactcccaccgccgataagcaagggggacactccggagagacggggcgcggaacccaaggggtcgcgtaataaatgcttggtggccgtgaaacgccctgcccgcgctcagctaatagcgcgcgacaccccggaaagacggggattcatagcggttcggcttttgcgtgtagctcatcggttagagcgcgcctaaatccgtccgatacggatgcagcaatgggcgaggtcgtcggttcgaatccctcttcgctaaggccgcaccgctatggatcggaatgcgcaggctgatgcgtaagggtttaaggcgctgttatggcgctccgcgggttagcgtgtaagcgcccgtatgccgggttcagcgccggtacgatccaccacatgcacctgtcgtctagcggtcaggatacgggattttcacttccgttacgcgggttcgaatcccgccaggtgtgccatgtacccgctctgcgaaagcatcgggcaaaagagtgtggcggccatgatgcgaaccatggcaatatctatcgacgccgcattcgctgggacgatggggacgcagcccgtaagccagcaactaacaccgaagcgccgaagtaacgccgagcttggactaaagcgggacagccggaaagacggcgacgtatcagggattttgtagcccgatgacgcgtgacagaaccccgcttcggcggggtttctttttacccgaacaattcgccgcctgcgcctggaaggtgagcgacccactcgcctggctcggtcatcatcatgcgatcctgcttgacgctgttcaaccgcgccgggatcacttgcaaattccaccacgcatgcttcccgccgcgcacaagcggcgtcatgtggtcgacggaccaggggtagccggtcatcgctgcgcgacgcttgcacgcggcttccgcttcggccaagacgaacgaatcgaagtcgccgaagtccggcaccgcgccgccctgtagcttcagtttgcgacgtgcccaccccgacgacaggttcaccagcggccgagcgccatcgagcgcgaaggcgaacaggtcatccccgttcgccaggcgcttgcgcagttgccgttcggtcctggcgttcacgccgcgacatccatcgccccatgctgcgggcagtgtggcgggccgacatccagccacttcgacgtgacgcgcactgtgtacccgcattcgccgcacgcagccttgtgcaggcgcgtcgtctgcttcggcggccggttgctttccggctcgcccgcctcgccttctggcgtgccctgcggcgcttcctgcggcaccaccccgccaccctcgcgcttcaccagtttctggcgcgtctgcgcctggcgcacgaccagcggcgagtgcgggatgtcgccaagcttgtcgatgagtggctgaacccacgcgatgaattccgggccaggcttcgaacaggtgaacgggcgttcgaaccccatggccttcatcatcacggcgaacttgcccttatgaccttcgcgcaggccgaccgcggcgtggttgagttcgtgcgccagaatcgccgagattgccatcgacgacgcttccgccgggtgaattaggatcgtgtaacgctcatccgctgtcgtgcgcttatcccagcactcgccgttcgcgctgccgcctatcccctgcgacgtgaacccgatggacacacggaacgccggcagcgggtggccgagttgttcgaaccgcggcgacatcaaggccgccatttcgttaagccacgtttccctgttcatattgtttaaacggattgaatgcggatggggtgaagaaaaccccgctctgggcggggtgatcttcgttcggccgtgttcgcgttacgacttcaggcaggcggcgcgggtgttgatgagggtgccgtcgtcgagcttcaccgaaaaccacttgccgcggagaccttcgcgaacatcggtgatcttgccgctggcgtacttggtgcccaagacggttttcgccttgacggtctggcctttcttgaaatcggacatgttgttcagttttgtagttggcgggttatcccgcccgtgaattatccatcacaaggcgggagtaatgcaatacccttttgcgaaaatcagaaagggatatcgtcgtcggcgaagtcgtccatcggcggcgggttgcgagccggcggctgccgctgcgtgcgcggcgcttcctggcgctgcgtgcgctcgccaccctggcgctgctggctgtcgccttcgcgcttggcgccgagcatcttcatttcgctggcgacgatgtcggtcgtgtagtgcgtcacgtcgcccttttcatagctgccgtacgacagctttccctcgatatagacctgcgaccccttgcgcaggtattcgcccgcgatttcgccaagcttgttccacagcttgacgcggtgccactcggtcttttcctgcgggttgccgtcgcgatccttccacctctcggtcgtcgcgatgctgatggtggtgacgcaagcgccggattgcgtgtacttcacatccgggtcgttgccgaggttgccgataagctgaactttgttgagcatggctgctgtagttacctgttagtcgtgtagcgttgatgttgttcggcgcacgcagggccgcagaacagccgggccgtatcgctttcgtcgaattcgttttcacacaacggattgtagcagtaaccccgcgcgacgatgcgcggggtacttgctgcaatctgctgctgaacctgtagtgcctgcgcgaggttcttcgcgtcccgttcttgtgcctggtcgaacacgtccatttctatgcggccgccttggtggtttggttggtggacttcgcttcgtacgcgacaacagattccagcgggtatcgaacgcttcggccgaacttcgtaaacgccgggccaatccccttgctgcgccagttcgacagcgtgcccgtcgttactgcgtttttccacctggcgaccagttccgcggccgtcaaataattttcgttgggcatgtccgttcctttcctggcttacccgttgtcgttcataacttcgttgttcaggtcggccagttcctggccgccgggcttcgcttcggcgcgcatcttgtcgaacgcttcggcggcgaccttcagcgggccgatgctgccatcgccggaaagcgccttctgaactttcttcggcagcgcgcggaatgccgcttccagcgctgcaagacccttttcgctggtggtcttcagcgtggctcgcgccgcttcgacttccgggtccagccttgcgccgccgtcgacccagtcgcgcagtgcctttccttccttcgcgccgatatagccttcgccgcggccgaggatcgattgcaggtccgcggggcacttcatcacgtcctgctgcttgccttcggagtgcatgagaagcgaagcggtcatttcgaacatgaaattcttctcgcacaccggcataatgccgagcgggatcacttcggttttgccgcccaccttctgaatctgcaccttctcacgagcgcggatgcagaaaatgatatgcatgttgcactgaagcgcggtgttcatgaacgccttgtgctcgcgcttcgccgtcgcccagtcgggcatgcgcgggttctgcgcatgcgcgatttcctcgcagccgcccgtgccttcccattcgtgcgtcgcgctgtcgatcaccagcacttcgacgccggcacgctggaattccaggatcgcatcgacgtagcgtttcggcgaaaacggaggctccaagtcgccaaccaggaacgggtgcacgacgccgtcgctgtcgaccaacgtattcgcgtacagcgaaccgcggcggttttcagtgtcgagaagcccgactttcttggaatcgtaattcgccagaccccacgccacttgcagcgccgtgtacgtcttgccgctgccgctgatgccggacaggcccaacaccaggcgagcaccctcgcgcttcgcctcacggatattcagaacgcccatagttgaaatagtctctctgctgtttactcgttcgcggcggaagcggccgcgcgctggaattgccacgcgggcaatttgatttgacgaatcgcagggctgtagccgggccactcgccggattgctcgcacttcgtgtaccgtgccaggtcgttcacccactgctgccggccgagtgcgcggctttcgtcgtccagccggtacacggcaacacctttcgcctgcccgtcgacgacgcacgcggttttctccaccgcgatgaagacgaacgcacgcggcggggcgaagtcttcgaagccgccgcactggcgcagcgcttcggtgccgccatgcagatagaagtcgtcctgcacgtgatacgcccacttcgcgatgctgcgcgcgaattcctcttcgctggcgtcttcggtggacttcaggtcgatgagaattccatctttgcgccacttgtcggggcggatgcggcacagttgctgcccgatgatgtcccgcgtgatcgggtctcggatttcctgcatccagtacgcggacagttcggattcgccgggggcggaaagcagcttcgacgccgccgggtgcgccatgatcgcgtcgcgcatattgcgcaactgttcgaactgttccgcggtcaggatcgtgcgatgcccgttgttgcgcatccactcgccttgcacgtcgctccacagcgtgacctgcacgccgttcgcgcgcaggatttccgccaggtcgtggcgcgagccgctgacaggtagcaggccggcgcgcgtttcgttcgcatcctcaatgatggccttcaggtctgcgcctttcatcgcattgagcaagtctgcgtgatatctgccatgcaactcggacgagatgcgcgcaacaagatcggccttgctgccgctggtcggaagcttcgccagacggctttcgttgagcttcgccaccatcgcgaccagcgcttcgcgatcatcgattgcttctggaacgtcgctgcgctgaagcgcgagcgtgtaggtcttcgcgaacaactccggttcgagcacgatcatatgcaatgccgtgccgatgaactgcgccgcggtcggcgcgcgtgcgttgtcgttggctgccgtcaccacggcgcgatagtgggcgggtgacttgcggatgaggtcgagacctgatttcgaaatgccggggccgtgatgatacgcatcattcgacagcccccggtaaacaccgggttccatagtgactcctggttttgtgtgatgagcgcgagtgatcgcgaatgaattgtaacggctacgttgacgccgtgtcaaagagtgcgcggcacatacgcattcgcgcgaccctgaatgaatttatgtagatgaacatacgtctttttcccgaagcgtgtatgtagatgatgcagcacgcgcgatgagtcaatcagcgtcgcgtcagcgtcgcgtgacacccgcgttaatcgggtacaatcggaaaccactacagtgaaaggggatgaacgaagatgagcgttgtcgctctccgcgattatcaacaggacatgattgcgcgtcttcgtgtcgcactcaaagaccatcgccgcgtgctgctgcaagcgccaaccggatcgggaaagacagttctagcgtcttacatcgccgcagagacttcgcagcgcgggcagctaacttacttcaactgccatcgcgtcgagttgcttcgcggaacctcaaacacgttccgcaagtacgacattccgcacggcttcatcgcggccgacatgccgcaatcaagtgcactagtgaacatttgcagcatcgacacgctgaagggtcggcttgcgctgaccgccgagccgcgtgtgtgcatttgggacgaagcgcatcaccttggcgccgatgggtggacggcgatcatggaagcgtggccgaacgcgctgcatatcggccttagcgctacgccgtggcgcctggacggcagcggattggacgaacagttcgatagcctggtgccaggcccaacaactgcatggctcatggaacaaggccacctgtcgcaatacgaaatcttcgcgccgttcgcaccgaacatgaagggcgcgcgcaaggcccgtacaaatacgggagggacggatttcactaagaaagacgcatcggcgcggatggatatcccgaagcgtaccggtgacatcatcaagcattggcggctgcacgcggaaggcaagcgcaccatcgggttcgcggtcaacgtcgcagactcgctcatgctggtggagcgcttcaacgccgccggcatccccgctgcgcacctggacgcgaagacaccgaagggcgagcgcaagcggatcattcagggtttcgtcgacggaactatcctgatcctgttcaacgtcgctctgtttgatgaggggttcgacctggcggcaatcgctggcgtcgacgacctcactattgactgtctcattgatgccgctccgaccatgtcgctgtcgcgcgtattgcaacgctggggccgcgtgcttaggcgcaagccatacccggcaatcatccttgaccacgccggcaacagcgcgcgccacggcttccccgatgatgaccgcgtgtggacgctggaaggtaaggacaagggcggcgcagcgaacgacaacgggccgccgccgcccgtcacgtgcacggggtgctttcgccagatcaagcgtcccgttccggagtgctgcccgtcgtgcgggaaacgcatgttggccgaattgaaagagattgaggccgtcgagggcgaactaaagaagatcaccgcggaagagaaggccgccgccaggaagcagcggcagcaggaagaacgtgacgcgcaatccctagcggagcttgtcgcgctaggccaccgccgcggctaccccaacgcgcaggcttgggcgtttaaacgatggcaggcaacactcgcgcgcaaaaaggcggcgtgaacacttgcattccgttctgtgaataccttacgattcgctcacgggttgtacaccgtgacctcaactcactgaacgggaaccaagatgaacgagaatgcgccgtcgtttaagcagatggtgaaggacgggaccgcgaagcgggccgattcgctgaaattcaacatcgacgacatccacgaagaacctgggttcaaccttcgccgtgagggcgaagacctggaagccagcatcgacgcactggccgcgcacatcctgggtggcggaatggtgccgcccctggaagtgcgcccgcgcatcggtggcggcgtgttcgtcgtcgacggccatcgccgccgccgcgcatacctgaagatcgccgacaagctgcgcgacgactacggtcaactgtggattccggtggtgcagttcaccggaaacgatgtcgaccgcgtcgcgcgcgtcatcaccagcgccgaggggcgcgcgctgtcgcagttggaagttgccgaaggttacaagcggctcgccgcgctcggcaagtcgcccgagtggatcgcgcagaaggtcggtaagacgcgccagcacgtcgaccaactgctgatcctcgcgaacgccaatagcgacgtgcagcagcaggtgcaggccggcaccatttccgcgaccacggccatcgatgcggtgcgcaagcacggcgaggacgccggcaaggttatcgccgaggaagtcagcaaggccaaggccgccggcaagacgaaggcgacgaacgccaccatcaagggcaagccgttgccgcgcaagctgtgcgacgacgcgttcgcgaccctggcgacgctgcacaagtcgctgacgccggccgaccacgaaacgctcgcgacgatgaacctttcgcagtcgccgcgcatcgaacttccggccgacatcgtgttcgaactgctggaaatccaccgcgaggccatcgagcacgccgagaagcaggccaaggccgtgcgtgatgctcaggccgcgcagaaccaggcagaactcgcgtgagccggccgcggtctgtcatggtgtacgggccgcaaggatgcgggaaaacgatcaacgccgagcgtatgcgctcggccttcggtatggggaaaatcgtcgatgactggcgccgcggcgaccagtttccgctttatggcgcgctgatcctgaccagcgattacaccggctaccacgcagcggcgggcatggtcgagcgcatgacgttcgacacggccatgacggcggcttactcatgagcggccgccaccccatgacctcgcttgcgaggatggcaatcaccctggcgttggcgtacgtcgtcgccatcgcttccgcaatcgcttacctgtggtggccgcgatgatcgaccgccgtttggaacacgcgatccaaaacgaaatccgcaatgcgctggtggatgagtgccacctgttccgcgctaacgtgggtgtcggatttcagggcacggggcggccgttcaagaccccacatccgatcaccgtcaacatgtcccccggtgacgtgctgctgcggcaggcgcggccgttcgacaccggattgccgccaggcttcgccgacacattcgggtgggtgccggtggtcatcacgcccgacatggtggggcagacgttcgccatgttcatcgggttggaaatcaaatcgcagacgggtgcggtgcgcgacaatcaaatcgcgttcgtcaatgcggtgaacagggcgggcgggcgcgcaggttttgcgcgatccgtcgaagatgcacgcgacatcattcggggcgaacatgcacgcatcaaccttcaacagggagcgacgccggatcgaacggcagtcgcggggaagcgcagccgctgagcgccgcgcattgcagcagttggtgcgacgcgttcgcgccatttcgatcatcgagggcggacgcatcatcgggtatcgcatgcgtgacggcagcgtcgcttgccgcaaggttcgatacctgtcgatcaccgatgcggttaacgacatggcgcgcatcggcgcgcttccgaacaagggccacaagccgattcgtgcttacccatgcccatggtgtcacggctaccacctgacttcgcgtcctgcgtgatcgcgcgttaacaacgattatttcaggcgatattcacaactgagaacgccgcgcggtacaattcgcgcggcgatcatttcggcacgacatgaacacacgaaccaaacaacttgacgcgttgatgaaagagcacggacttaccgcgcgccaggttggcgaaatgatcggccgcactgcgcacacggtccgcgtctggcgcagtaagtatgagcaccgcgtcatccctgagcacaccctgtcgcacctgctggtgaagatcgcagaacgcgcgggcggtgctgcgtgacgcaatacgacgaaaacaggatcattgacgaattcctggcggccatggccgccgatggaattcgcccgatgttcaagcctggccagtctgtcgaattcggactgacgcggtcggggcgcccccaccgcttccacgtcgacggtgacagcaagggcaccgtaaacggctggtatgtgctcttcggcgacggcatcccggccggcgaatacggatcgtggaaatcgaacgtccgcaacacctggtgcgcgaagaatcaccaggaactgaccgacgacgaaaaacagcagatcgccgcgcgcatggccgaaaccaaggctgcacgcgaggcagagcaacgcgagcgcgagggcaacgcagcgcgcgatgcgaacatgctgtggaacaacgccgagccggccgacgactcgcacccgtacctgcaacgcaagggcgtgcgctcctatgggctgcgcgcggggcactggcgaaaggaagacgacaccggtcgcgtgtggctggatgtccctggcgcgctgcttgtgccgattatgctggtaagcggcaaaatcgtttcactgcaaggcatctttccgagcaaggcgaacgcggcgaaccgcgataaagacttcctgaaggacggccgcaagcgcggcggtttcttcctgatcggcacgccgccgcatggcgatggcgtcatcgtcgtgtgcgagggttacgcaaccggcgccacgatcaacgacgctacaggctggtgcgtcgctgtggcgttcgacgccggcaacctggtcgcagtcgccgaggatcttcgggccacgctgccgaacgcgtcgttcgtcatcgccgcggataacgaccgctggtcgcgcatgggcgacatcgagaaccccggcgttcacttcgccgagcgcgcggcgttcgctgtgcgcggtcgcctggtggtgcctgagttcgccgacctggacgacaggccgaccgacttcaacgaccttcagcagcgcgagggcatcgacgttgtgcagcggcaactcatgccgccagtgccggcgacgatcacgcccgacgaaccactgcccgcgttcgatccgcgcagcgtcgacggttacacgccgttcccgatggtcgacggaaaggggcggccgctcgccaccatcgagaacgtggccgagttgatgcgccgcgcgaacatcactgttcgatacaacgtgatttctaaggacttggaaatccgcattcccggcgcggtcaacaccgtggacaacgccggcaacgcgtcgatgaatcgcgttgtgtcgctgtgcgagacaatcggatttccgaccaagcacctggaaagctacatgctcaacgtcggtgacgataacccttacaacccagtcgcaacatggatcacgtcgaagccgtgggatggtcgcagccgactgaaagagtttttcgacaccgtcaccgccaagtcggatcgcaccatcccgtcaaacggcgcgagcctgaaagagacgttgatgaggaagtggcttatctcggcaatcgccgcatcgtttaccccgtctggcgtcgtggcgcgtggcgtgctcacattccagtcagaacagaacctgggtaaaacactgtgggtgaagcgacttgcgccgcccgagttgggcgtgatcgctgatggcctgatccttaacccgtccgataaggacagcatcatggggtgcgtgtcgcactggatcgttgaacttggcgaagtcgacgcgacgttccgtaaagccgacatcgcagcgctgaagggtttcatttcgaaggagcgcgacaacctgcgccggccgtatgcgcgcactgaatcgaagtacccgcgccgcaccgtatttttcgcgagcgtcaacgatgagcaattcctgcacgacccgaccggaaacacgcggtggtggacgattgccgtcgaggcgctgaacaatcagcacaccatagacacgcaacagctttgggccgaagtgcttacgctgtttcaggccggcgaaacgtggcatctgacgcgcgaggaattgaccgtgctgaacgaccacaacgtcgaccacgaaagcatcaaccccgtgcatgagcggatcggccgcgcgttcgcgtggggcgagccgaagacgctgtggcagcgcccgatgcgcgcgacggaaatctgccaggccgccggcatcgagaacccgacgaagcttgatgtcaacgcggcggctgcgttcgtgacgaagcgctacggcgtcgacacgaagaagcacggcaaggaccggcaaaaggtgtggatgatgccagcggctcacggcgcccgcagcgacgttgcggacgacggggggccgttctgatggtcgttaccctcatcgatggccgcgaggtatccagcgacagcgaggaatggcgccacgaatgcgaggcgcgcgctgtgtgcaagatgcgaggttacattcacaccgacaaggccaccggccggcgctcgcccgtcagcgcgaagtcagtgcggcagcgatacatgatcgccgtcgcagaaaagcgcgggcagccggcagcagatgcgctgcgagacctggtgttgcgcatatggaacgatgagtttcgcgaacaggcgtagcattacatatgtaacgcactcacaatacgcccacaccttcaccggacactgacatgaacgaccttcgcaaccacatcatcaacgcgacgccgaagactccgcgccgggtccgcgccgcaacggtcctgctgtgggtcgccgccgcgttcgtgtggggagccgtcgccggccgcgccagcgccgcggaagcgctgttcgaagcgaccagtcaggctggcgagacgaaggccgcgttcctgcaccgggtcggcgcgctgatgcgccagtggtcggacggttcgacgctggaagcctgcggcgtgatcgccaccgatggcgagcggttcggcgttgtcgtgaagacaagcggctcgcacctggcctgcgccagtggcagcaaggccgtccccgccggcatgcagtccacgggcgagacgatccacacgcatggcaccgacaggccgttcgtcgtcaacgacgccgacgccgagttcaccgggctgcgcaagggttcgccgatccacggccagcgcctggatcgcttcagccgaaccgactacgcggagccgggttacctggcggcgccgggtggtgaactgttttaccaggacggcaagggtacgcagcgcgctgttgcgctgtaatcatcacgggcgaaagcccataaccgaggaaaggacgtgaccgaatacgagattggcgacagggttcgctgcaaaaatgcgggtcaagtggacatcgaagtcggaatacgggacggcgctgtgggtgtcgtgaaggaagtgagcaacctcgcgttcgtaaagttcgacggcatcacgatcaatcacgccaccgaaaacaaccgcggcggcgcgtgggcaatgtacgattatcagttggaacgggtggcttctgaagtcccgccgatgccttttttcgtcaagcacaaggattccggcaaggaataccggatcgatatcgaaaacggcaatccaatgctgacaaacgttcgcagcggggagaagttcaaaggatacagcgaggaagtaattgcggacatcattagcaacggcttttgggtcgtcgtcaacgacacaaccccagccgtcgacccggccactacggcatcgctggaagttcagcgactgctgcgcgagcggtccgcagcgttggcggcgcgcgaggccgcacaggctgttctggacaaggccgaggaagcctatcgcaacatcggcaaagaactgaacaaggcaaggggcgaactggaccgtgtcaaccacgaagcggccggcgtgaagttcgacccgatcccgtacggcttcccgcagtgaacaagggcatcggcgcggcgtatcgcgctcagttcaggaacgggacgcgcatgccgacgcgatacccgtgccgatgctctgtgtgtggccgccggcacacgctgcgcaagcagcctggcgagtaccgaagcgagccgcggtgtaagtcgaaatgcagcggcgcaacgctgcgcatcgactggttcaggatggcggcagagtggcacgccaggccgtgccgctgcgacgaatacagtttcccgcacgcacacggccgcgggttctgcaaacacaatcaggcggtcacgctggatgatcgccgtcaacgatatgaggaagggcgatggagttgaacgcagcaaatcaggcgcaacatgatgcgattgtggcggtgatccgcgagcgagcgcgccaggtcgaaacggggcgcacgccggagcgcgacgcgctgtatcaccagtgcgaactttcgcgcgctgcatcggcgtatgcgaccccggccggctggcgacgccacaacggcgacggcgttcccaccatgtggccgtggcatccgtccacgttccgcgcggagccgcagaccaccgaaggccggctgcgcgaactggcgaaggccggcgcgctgatcctggcggaaatggaacgcctcatcgcgaaggctggtgtgtgatgagggagtgcaaggggtgccgcgagacgaagccgttttctgagttctcgccccacaaaggcggtcgcgatggcctggcgccccgctgcaagcagtgccgcaacacgcgcgcgcaggaggtgtgcaaggcaatcagcatcgtgaccggaaagcggaaatacgtccgcaagaagccgcgcatctaccctgacggtttcggccttcccgtcgacagtagaagcgctcacgacaagtcacttgataaagtgctggctgtgttcctgcgcgagtcagcgcgaacaggtgaaatcggcaacgtgttcccggtggtgtgatgagtgaactaaaatcaatgccgctggacaaactgcgcgcgcacgctcgcgatgtccagaaaacggcggactggctgcaatcgctggcagccgaggcgcagcgcgaagccgtgatggcgcgcagggaaatcaaacggaggaaaagaaatgcgtccgaactgttacaaccgaccgccgttcgctgatgggcggtgggaatacgcctctcagaagctggtcggtcatgataagtacggcataccggtttacaaaaccgttcttcgctggcgcccgcgctggttcgaagatcgctgcgtgatccacgacggccgcgggatcgggccgaacggggagaactacccggctgcgcacggatgggattgcagcgggtgcaggtgggagcctcacaaaccgaacatcgccggaatccctgtctttttcgacgaatccatttcgcccggaatggtcgtcgtggataatgggcacggaaagctgcaattcatcgacgcattcgaaccaatccacaggagcatcgccaagtgaaagcacaagacatcctgcgccagtccgcgcagcacatcgacgaccgctcggcaacgcgcgaccaggcccagggcgagcgcagcatggcgcgcaccgtggcggcgttcaacgcgctgacggggcatgcgctgacagagcgcgacgggtggctgttcatggtggcgctcaaggcagcgcgcgccacgaacacgccggcaggcattcccgacgactaccaggacggcgcggcttacttcgcgctggctggggagtgtgtggcggggaatgacaatgcgaatgaagaaaagcggggggcttttcgaacgataattttcatcgagggcgttggcgaagtcgagattccagacggctgcaaatgggtcgcgaaggatgaaagcggcaaatggtgggcgtatccgcgcgagccagtgcgggacgaaaccatgtggagaatcaaccccgtcgttggtcagcccggggctgtgcttctctgcgataccgatgaaggtaatggttgggaatacacgcttcacaaggtcatctaatgacaacccccacgcaacgcgtccgcgcgagcgaggcgcgcaagatcaaggccggcgggcgccgattgtcgcccatgcttgtgtcacccgaagccgcgcatgcaatagaccagttgttgcgcgcagggttcgcaggaagcattaccgcgtgtgtcgagcgggctattatcgacgcgaacaacaacaggaaaggacgtggacaataacagaatcaaaaatcagttctatgcggtgaacgcacttgcggaagcggttggcgtcgacatccacgatgtcacggacgcaagggatggtgtcgaaaaggcacaggtgctttgcagcttcctcgctgcgcgttcgggttggtggaatcggcgcatgccgaatgtgccggcgcagtgtcgcgaggccgttgttgcggcgatggggcgcgaaggcttcccgctcggcggaccgctcacgttcgaagaaatcgccggcatggtcccggaaaagctgtgcctgtcgcactccgaactgtcggaagcgatggaaggccatcgcaaggggctgaaggacgacaagcttccgcatcgctcgatgttggaagtcgagttggccgatacggtgatccgtgtgttcgacctggcgggcgctctcggcctggacctgtccggcgcgatgatcgagaaactcgcgtacaaccagcagcgcgcggaccacaagccggaagcgcgtgcggcggctggtgggaaggcgtactgatgaagatcgtcgccgcaatcatcatcaccatggcctgcgctgcatgccgaccggcaccaccgcaggcaaccgagaaccgtcaggcgcccggcgctgtcgcttatcttccggacgcggccggaagcagcgtgacccgtatcgatgacgcagaacgtggcgttacctgctacgtgagcgacgggtacaagtcaggcgggataagctgtatcaaaaactgaacttataggtacagtaaacacagacacgacccggcgcatgccgggttttgtctttgctgaacggcttcagaattttcatgcacgccgtggttgcattacatgtgtaacgcgtgagaggattcaactacaccaacggaacggcacgcagacatgagcatccagacctacagcctcactcacaacggcatgaaggcgattgcggcccaggacggaaaccgtcgcgtgctgaagcttgggcgctgtttgtttggttacgaaatccgcaagaacgctagttcgccgtggcgcacagctaagaccggctcgcacttctaccgccttgcaaagcaattaacctaacaaaaccgcccgggttcgccggggcatcaccgaggaaaggacaatgccattcgccatccgccaaacccgccacttctacggcccgaagaccgttaagtcgtacgtcaccgacgcataccgcaacgattcgcgcgccgagttcgcgacccgcgcggaagcgcagtcgacggccgacacgctggacaacgcaacgtatcaccttggtcacaacgaaagcggtcggccggaattcaaggtcgtgcgcgtgaggggtgcgaagtgagcggccctgtcgctgtggatgtgctggcggtgatgggggccgctgtcgagttgggtggcgggaacgtcaacttcaacatgattaacgctcgcgacgcagcgggcgaccttttcgcaaagacggacgaggcggccactgccatgcgcgtcgtggcgctcgccatcgagggcggctacaaaaactggacccgcgaggactgcatcgcatttctgcgcgaacacgcggatttagttgctgcgtccctagcccgcgcaggcggtgcgcaatgagcggcgcgcacgcagcaatcgggctggttatcctggtgctgattgccctcgcaatctctttcttcggcgataacgacaaggaatgaccgccagcagatgccgtttcaatgagacggcatcaacgggcgatccgacccgactaccgagttacacgacatgttcaatatccgtttgctgttcgcccgcgccgctcgcctgatggcatccgtcgcgccgctcacgcaggcccgcaatggcgccgccgcataccatgccgccagcgaccgcgcgccgtacccgcggccgtcgcgcagcaagtacatgccgcaccaggggaagcgggaaacgctgcggcgtcgcattggcgggttcgctggtgttgccaacatggtcgccagcgccgcaaacggtagcgcaacccgcgaagccgttacggccaacctggacaagtggcgcgctcgcgcatcctgaccgtcagcctatggccctgcacacgcggggccatacacgggcgatccgacccgattaccgagacaataccgtgaacaccagcacgcagcacgcactggtcggaaagatcatcaccggattgcagatcgcgagcgataggaaggcaattcgtttcatcacagaagacggcgaagtcatcgcgcgctgcaatggcgattgctgctccgatacgtgggtcgaggccatcgaagtttcggtgcgtgaattcccggcaaccgtgaccaccgccgaggacatcgccttgggcgacgatgaagaaaacgaagaaggctgcatcgcgcactacggcttccgcgtcgtgaccgacaagggccacatcatcatcgactatcgcaacgcctcgaacgggtattacggcggcgaactggtgtggcctggcgaacaccattacggcggcgtctacgggcagaacaattccaccgaggaatggaccgacgtttgaccgccagccgctgcgccttccaccgagggtgcagcatcgggcgatccgacccgcaacaccacgaaatcaatatgcgaccgagcgaactgcgcgcgcttcagcggatgcgcgatgggatttaccagcggaaattcgatatcgagaaggcgcgcgctgaagaccttcggcgacaggttcagcaggcgcgcaatgatcggttgttgtttcgcgctgccattgccgttggcagcttcatcgtcggcgccactgccgccatttttattcaaggaattttctgatggaaaacgaattcaggccgagtgaagaacaattgtctacgatccgtcgcgcgtacgatgacagcgacgcgatggcaggtgttttcgcgatgcataacagcatgcggacgcaggaggaagtaatcgcgttctactgcttctgcatgcgcgagtggcgcggcatcaccgaacgccgagtccatgatgcgttggcggcccctgctgccgctggtgtgcatgatgacatcactatgtctatggttgaggcggcatgcgaggctatatacatcaatcacaagctagcggggaaggctgagcgcgaagagcgagaaagcgaaatgcgcgccgcactttccgcagcgattgccgcacagcccgcaacgcagccgcaggcagagcagcagggcgcgggggatgcgctggaaatgatcggcgccaacttgcgcagcctgttcaagatgacggatgaggtggcgtcaaccgacacggtcgcatgggcgaacatgcgggacgaaatccagcatgcacagcagcttctggccgccgccatcgcagcccgccagccggtgggggagccatcgcactacggcgacccggaacgtggatttttcgtggaagcacccgtggttcccacattgagtgctgactacgcgtcgcgctactcgctgccgctctacaccgccccgcccgcggccgtggacttgccgagcggcatggtgctggtgcagaccgcggatgcggaaaggctttgcagcatcggggagtctttcgggcagcacttcgataagttgccggtgatgcgtgtgcgcgcgctgattgacagcaaggcggtgcggtcgtgatccggcggcttctgtgcaggtacttcggccacaggccggagacctgggggagcctggggcgcatcgggccgccccatcacgacggaatgggtcgcgcgcaccgcatggtatacgcgcagtgttgccgctgcgggcagcacttctgcgtgggtgatgttatcgacaagacgcatcaattgaaggagcagacccatggctgacattgaacagcgggcgcggtttgaagcgtgggcgaaaaccaaagacctgtcgattaaaatatgcggtcttaatgggttctataaccaccccgttacgcgtggcgcatggatggcttggcaagacgtcctcgcctcgcgggcgcctggtgtcagcctcgcgatggtgaatgagctttgcgaggcgtctagcgattaccttgcgtttgggcgcgacacggacaacagcgaagccagtaaggccggcgagcgagtatatgccgcaatcgaagcaatcgaggacaccgaagaaatgatcctctttaaggcattcggggagaggtcatgagccgctacacaaagaccgcgaatgtcggcggcatcgtctggacgatcatgtccagcaacgaacgcgaatgcaccgtggacggccggcacttcggtgcggggcgctgcaattcgaaacggccgtggactatctatgagcacgaccagcgaatcaccgagaacggccactgcaagctgttgcggcgctggcgtgggttcgacactggtagcctgtccttcgccgtgaaagccgtcgtcgcgggcatgattgaccggccggcagatgagtggccgtggttcccggtcccggcggtgagccatgggtgaccccatcggccgcccctggctgtgtccgcgctgctaccacgtcaacggcgcggatcaaggcgcgtgcgcattctgccggcgcgagcgtgtcaccagggcatgggctttcgtcatagtcgtgatgatgataatcggcggttcagttgtgcgcgagcgaatccacgaaatcatcacggcggcacatgcaggataactcccccacacacaccaggatgcccgcatgaacttcgatcaattcaacacgctgcgcgaacaggcgctgatgctgcacgcgagccagaccggcgaccacgtcgtcggcctggacgcggtgttcactgccgtggcgctgcacgcgtacagcgaccgcgcccgaccgcggccgatgccggccgcggacgcaccaccggccccgcaatggttcgctgacgctgtgcgctcgctcaagggacagcgcgtcaccgcatcggcgttcctgctgcttgcggggcgcacgcccgccacagacgtggaacggcgccacgttggccgctggctgcgcagtgctggcgtgcagccgcggaaggttgccggggagttgctgtttcagttgtgaggatcgcgcgagcgtagatcgaagaacccggccatgcgccgggtttttagttatgcgatgcgcttgaagtagatgcgatgacgatccttatccgtccagctttgcagcctgaagctagtgccaaccatcctcgctaaacgggcagaccttagcgccgcgttgatccttgaccgctcttgattgtaaccggtgacgaagaacgtatcgccgacgatcatccggtggattctgtaagtcgtcttcatgcccgcgatattaccgcggggacgtgtcatcgagttgtacccgccacttgtaccctaccttgtacccgccctaactcactgaattctaaggatatgagtaattatagggtagatgggtataagtattaggggaaaacgcaacaaaacaggacgtagacgaacaccttcatcctacgtcctgaaacggaataggtggttaggaccgagtcaccacgtgcccatgcgcccgctctaaatcatgtcgttgattttcaagagaattgatgcgggtacgaccacagggacaagtgggatcaactcggtacgtcgtgcccgccattcgcgaatgtgaatagttgtttctcggcgagtacacgggataatcacaggcgtgaatgatgcacgcccactaccgcgcaatgtccaggaagtcgccgacgtgatcgggcgtgacgctgcgttgcgtctagtggattcgttgcctcgcgcactgaatcgaccgtggcaacggtggtgctacgtaccgcagaagattcgccccgatcaccctttgtcgttgctgctggggtgggtgctggctgaaaagctggtgcacgtcttcggtggcgaaatgctcacgctgtcgaactgttcgtatacgcgcaaggatgagcgcgacgcggccatccgatctatgcgcgcttcaggtcgaagcgtgcaggatgtcgcccgtgaattccgcatgagtgatcgccaagtgcgaaacatcgtgaaggaaatttcgcaagtggaaacgaacgacaacatcgccaacactgccgcggcctgaaccaactatgagcaagcaccccccgatgaaacagcaagctttcgacgccacgaacggcaccatcgcagtgtcctacgtggcggccaccctgaacggatggactgtgcaggagtgggcggcgtttctcgcggggctgtactcggccgttctgctggtcgacaagttcttcccggcgatcctgccgtggttgcgtggcgcgctgatgtcgggtgtgtcggccgtgtggtcgcgggtggtgcgtcgtgggtaaggccggcaaggcatcgttcgtggccgccccgttggtcgtcgtcgctggcatcctcgccgccctcactggtgccgagggtcgcaagctggtgccgtatcgtgacatcgcgggcgtgtggacggtgtgcgatgggatcacgggcaaggccgtcgttccggggcgcacgtacacgaacgccgagtgcgacaagctgggccaggactacgtgcgcacgatgctggccgacatgggccagtgcgtgaagggcgaataccccttccatgtcatcaaggccgcgggccacttcgcctacaacgtcggcacgccgacgttctgccgttcgacgatggcgcgcaagttgaacgcgggcgacatccctggtgcctgcgccgaaatttcgaagtgggtgtatgtggccggtaaggattgccgcgatccgaagaacaagtgcgcaggcattcccaagcgtcgggaatgggagcgcgctacttgcgaggggcgcaacccatgaacccgaccacgatccgcatcgccgcgctggcgatcctgtgctttctgtgcggcctgttcggctggacgatccgcggatggaaggccgacgctgtttcttcggggcgcgatgcaagcgacgcgcaggcgactgtgcaggtcgtgcaggacgcgcgcaaggaagacaagcagacgcaggccggcgtttccgaagtcgaagcagagaacgcgcagcagcaggaacagacgcgcatcgaatacaagtacatcacccgtgaggttgtccgttatgtggctgcgaatccttcccctgctggctgtggtctcactgctgacggcctgcgcatctggcgtgccgcgaactccggatcggcaagtgccgaacctggacgtgccgggggcgtcggtgatgctgtgcccagcggaactgacgggcgacccgcagcagggcaagcccgagcaaatgctacaggcgcacgttgaggacgccgagacgtatcacgcatgcaggctgcggcatgaggcgctggtgaaggcgctgtgcaagcagcagggcgtgacgatcaatggtcgtgaccctgtggctgtgtgcaaggtgaagtgagttgcatgcgtggagcacgatgttccacgcatgttcgttccacgtgaatgctgaacgagttgttaaggcatcgtgaaggcagttgttaagatatcgttaaaaaatccgggtccttccctaagggggtgggcctgcggggt

SEQ ID NO: 14 - DNA, 44716 bp, unidentified
  misc_feature 1..44716: note = the genomic sequence of a bacteriophage
  source 1..44716: mol_type = unassigned DNA
tagagcgcatcaatctgttagttttttcccacagtgccaatggaggcacaacatgcacggttcgatcaacgccaatctcgaacgcacccgcaccaagcgccgcttttgccagttcaccaagactgcgagcgtcgttgacctgcgcaccaccgaatacgaccgcaagctggctgagcgcaagcgccaggccgagcggtacgaagcccgacacggaaccgctggaaagcgatctgtgtttgtcgttgagggtaacagcgggaccgcaagggcgaaccacgccgctgatcggagggcttacctgtgatccgcatacgcttctccgaccggttcccgtattcggcgtttacgtcgtggttcaatgcgcagcagcggcacggtgctgctgtgtccgacctcgttcacgacggcggatgctaccgctacaccatccgactcccgtaatgcaagctactagtccttcgcaagaggggctagtgtcgtgcaatcggcacggacccacctgaagggaaccaccatggacatcatcaccgggagcgctgacatcaagcgcgccatcaagtcgatcaacacggcccgcaccaagctggtcgatcagattcagcaggccgccgtagcggtcatcaaccacgcacatatccacggcgacgttacgctcgcttccgatctgtgtctcgccgtgggcaacggcatgaagcacgaagccctgcgtctgtatctgtccgaattcggcccgatggcgcccaacgacgacaaggagacgaaggcgagcgcgccgatgaagttcgccaagagtaagcgtgtggagggcgaggccctggccgacatgttggaacgtgccgccgcgaaggcgtggtgggacttcaagaccgaaaagcccgccgaggcgttctcgttcgccgctgacctgcacaagctgcttggccgcctggaaaaggccaccgagggcggctacgtcccgaccgacgaggagcaggccgtcatcaacgctgctcgcgccgtcccgaagcccaccaagaaggtgcaggcgtaatgctgcccggcacccgcgtcatcggagccggtgtgcgtgggtgccactgtctgaccgagggcaaggaatacacggtagaggactttcagcccgcctacaccgacccgaccagttcgagcggcttcacgtggcctgcatacgtgggagtcatcaacgacgaaggccggattggttactaccacacccacagattcaaggagaaatagcatggcgatcagttacacaaaccggggaaacaacgccgtaagcgcccgtgatctggttccgggcagatactaccgggagaaacacgacgcacgggacgagccgatcatctatatcgcaaccgatgaagggtgcgtggttgcgctggatggcacccagttcaaagtgaacccgctggaatacatcgaggtgcaggtggacgtttacgtgggagacgacgtatgaacgtcgataccgacatctgcatcaccatgccccgcgaggaagccgagctgcttcgctcggcgctgcacatcgccacccgcctggcctcgaaccttccctcagggtacggcaatcgcaagctggccgacgagttcggccgactgcatgcctacctgcgggatgcggacgtggaaatcctgaccggcaccgtgcagttcagcgagaagatcctcgatgcagtgagccgctatgtcatggccaacctcggccggggcatgcctctgcacgtaatctcgggccgcccgagcggcgggaagtccgcactggcagacaccctgctccgcgaacacctgcacacgctgcccccgcaattcgcggtgaacgccgacttcagcaagctggaagaacgggtggccgcgtgcctcaaccagcagcctttcgagttcaagcgcccgacaacgggccgcgagcgtctttcggacacgccgatgccggacaacctgccccgctttggcaagctgtgggacgtactctcggaaggcaacgcattcccaggggtgactgtcgccccgaagaagaagggctggatcgtgcagttctactgcgagacgaaaggcactggctggacgcgagtgctcggcgggatgtcggcggcaaccggagtctacgagtcacgtaacgaggcgtaccgccagatgcgggcacgcagcaagcacagcatgtgcccgctgatccgctatcgtgtggttccggaaggcacggcgaacggcgaggagcgggaccgcgggttctacaccgtggaatactacaccaggcatgggacagggccgcgcgcacctcgcggttgggccacctctggcatgccgggcatgaacggcgtcttccggaccgccacggctgcgcaagatgcaatcgataagcgcgtcagactgctcggcgagaggattcgcaagcgttaccgcgtgaagtggcacccaaaccacgcgtgatctaccgctatgccttctaacgagggcgtagctttggaaccacgcccaacaggagggcataagcaatgatccccgtaacttacaagcgcatccatagcggcaagcgcaagccgatccagctgtgcgagaagcctcgccagtggaaagagtacgtgacctatgagcacagcgtggagcgctggtatgcgtgaggtcagcctgcgccttgtggtgaaggtgctgccgctcgttaccgtggaaggtgccgctgccggggattatatcctcggcggataccacaccagccacgaggcatgcgagcaggccatcgcacaccaccgcctgcaccacgagaaggtgcccaccctctacaccatagaggaaatagaaatcccacccgtcaacgaggagaactaccatgcgtaagctgtacttcatcacgtccatcccggccaccgcaaaggatggcgtcatcactggcgtagtcgccaaccactcgggccgtgccgccacagccgaggaagcgaccgcgctggtcgagttcctgcgggagaagggtgcgtcgcagtccctggtggatgcgctgcgcgacggcacctatccgaatccggtgtcggtctttgaccggcgcggcgccgcacgtgccgaggctgctctgctgaattcgttcggtggcctgttcaactggtccgtcatcgcgctgggcgagagcatccgcaagccggtgcgcaagccgctgggttggcgcatcaagttcgacggcggctgcgtcagttgcttcaacagcactgactacggcgctacggtgcgcatcgacggcaacgaggagaaccatagcaaatacaacctgctgttcccgacccgcgaggcggcgcgccacgccctggacaccgaggtcggcgaggactgcaagcgcagccgccgtgacccgtggggctactacgcggaggcggtgtatgcgtaagctctggctgcgcatcctgatcctgctgtactggatcgttggccgtggcccttgggttgtcatcggacaatactacgacgatgaaggtaggctgtgccggttccgcaccggcccggcgtacatggggtgcacgctgacgttcgatgacatcgacgacgccaacaactactgcgcccggcgcaactggcaggcagacaccgacccactcggcaccacgtactacgtgtggcacgagatggagttcaacaacttcggacacaggagaaagtgacaatgggattcctcgacaagatcaagaagggcgcgcagtacatcaaggacaagttgaccaacgccatcaagcccgagcgtgacgacgacgacaccacgcctccgcctgcggtgaacacggcgaactacctgcacgtaagcgtgccgctggttcccatcgacaacccgatcctccgcaagatgctggggcaggattacttcccggtcgataaggggcagggtcagacccgcaacatcggcaacaaccacctgaagagcgtggccgaccacctcgggcacaacaacaagcagcgccgcaagctccgctctcgcatgaagcgccgcgccgccgagctgcgtgccggtgcgccgctggtgggtgcagcatgagccgggtgctgggtagttgggtcgaggtggtagtgccgcaatcctgcgctcacctcgaagccgtaacggattcgctggacgctgcggtgcaggctgtcggtggctgtactatcaccgagcagaccgggtactacaagcgcgaggacggtacggtggactacgagaacgtgttcaccgcgcgttacgacttcgacatcgacagtccgaacctggacgccatgctgtcggctgtgcgtggagtggtgcaggcgctgctcgaagcgggtgaggagtcggtgctgcgccgccggtactacgccccgagccgatccaccccgttcgccaaggcaccgggctacaagtccgagctgatcttcaagtaaatctcgcactgatttgcgtgccggaagggaccacgttacggaccaccaatcaacccgtcaatgaaaggagatacacaacatgtcgaacgagaacaccaacgagcagaccaccctcagccactacgaagcgaagcgcgccgagctgctggaagacatcgccaaggcgcaggccaaggtcgataccctggccgagaagctcgccaagctggacgctgtcgaagccaacagcgccgccatcgaagcgctgaagtccggcgactccgtgtcctacctgttcggccgcgccctgaacaagcgtgtcctgtccggcgtggtcgtcgccaccggcaagaacgacaagggcgtgctgcaactgaaggtgcagaccggcgaaggcctggatgccgagctgaacctgatcgacagcagcgccctgctgatgtcggccgaggaagttctgaaggcgcaggaagaaatcgacgccgccaaggccgccgccgaaggcggtgcgcagtgagcggcagcccgggcatcggcccgacccgcacgcagttcaccgcaggccgtgacctgaagccaggcatcggttaccgtgccatctcgaccggcgccggtgaggtggtggacagcgaccagtacctgctggtcaccaacgtgaccgacaagaagggcaaccgtcagctggtcaacaccagcaccggcgaggtgtccttcgccacgcctggctccatctggagctactgatccgacgaggatagcatgagcaataccctccccgataacgattggctaccacacgccgagcgcctgcctgttggtggccgcacacgagtgacccatgagtgcggggagggtacttccctgctgattactcgcgagcatgacaagtccaccgcgtactgtttcaggtgcggtggcacaggattcaagcatgagcacgagagtatagaggccaagcttaaacgaatacacgccgagcaagcgagcgagcgcagagtgcgcgaaactgttgagttgccagagccacgggtatacgacacccgcgagtggccgctcgatgccaaggtgtggttcttcaagatgggactctcgcttcagatgatcggcaagctgcggctgtactggtgcccgagcatcgggcgggtggtactaccgatcactgaaggcgacgacgttgtgtactggacagcacgaagcacaagccgtcaacccaaatggttgactcctgatgtgccgaaggatgggcttgtcgtacgctacggcgtgggcaagggggacaccatcgtgctatgcgaagacccgctatccgccttcaaggtgggccagtgcacagaagcgtggtcgttgctcggcaccaagctgcacaacaaagtgttgaagcagctgactgatcgaggccaacgtgtagcgacgtggctagatgacgaccgaggtagaagcgacggcagcaatcccggccaagacagcgcgcgagtaatcgctgcgcgtctgcgtgcgtttggtctggactacaggaacataacgtcaccgcgtgacccgaagtattacccgaccgattacatagaggagaagttatgtcaacagacctagccagtcagcgccgagcggtagctgtgtctttagtggcgcgcttcctatttgagagggacgacagcctctgcgattatgaacgaacggattacgagcgagaggaaagcgccaagctaatcgtccgagaggtgcttgaaatctacttgcaaggagaacccgatgagtcttgaaaccacgctgctgcggttgtgcaccaaccgtggaaagttcgagcggctcgtgcccagtgcaccacgtgacgggctggacgagctgaccgtgctggtgctcgatgcgttgcgtgcgtactacaaggagttcccggacacgaaggacttgccgttcgatgtgttcgatggctgggccttggagttcaagtggaagacgcagcccgacgacaagaagtccctgctgaaagttctgctgaagcagatgcgcgagcctgtcccgcccgaagcagagcaaggcatgatcgagaagctgttggagttggagctggcaaccactgcggtcagcaagatcgtgcagtggaatggcggcgccgagttcagcctgcgcgacgagttgtacggattggccgagtcgatcaacgaccgcatggatcgcaaggcccgccttcccctggtgcaggagacgcccgaggaactgatgcagatggacgagcacgacatcggcatccacttccgcctgcccacgttggcccgcaacctgcgcgcccttcgtggtggtgacttcggcatctacgccatgcgccccgacgcaggcaagaccacgttcctgacgagcgagtccagccactggatcacgcagctggacgacgtgtggccggaccagaagcgcaccggcatctggctcaacaacgagggaccgggcaagcgcatcaagcagcgctggtatcagtcgctgctcggcgctaccatcccggagatggtggagtgggcgaaggacggcagcatccgcaagcgcatcgaggatgcgatgggcggggacatccaccgcatgcagttctacgacatccacggattcaactccggcgaggtcgaggccatcatcaagcagaccaatccaggcttcatcatcttcgacatgatcgacaacatcacgttcagcggtggcatgaccaacggcggacagcgtaccgatcagatgttggaggcgatgtatcaggccgctcgcaactggtgcgtgaagtacgacgccgttggcgtggcgacttcgcagatcagcgccgagggtgagggtgtgcagtacccgccgcagtccgcactgaaggacagcaagacgggcaagcaaggtgcatgcgacttcatcatcatgggcggcaagctcaacgacccggcgatggaacgcttccgctacatcggcactccgaagaacaagctccaccgcgcaggcggtaagcgcgacgttcgggaagaagtgatgatggatgcagagcgtgcccgcttctatcaggaggcagcatgagcttcacttccttcgacctcgaaaccacgatccgtgccacgctgaagcgcaaggccaatccgttctacgacttgaacaagatcgtggcgattggctacaagcgcaagggtgatgcacagaacaccggcctgtactacgacacccgcatcggcgccgacaaccagtacatgggaggcgcacctgacgggtggttacgggagctgtgctacaacacgcagtacctagttggattcaatttgaaattcgacatcctgcacgccatctgccaaggcccgctcaaccggcaggcatggatcgagttcatcgacggcggcggcatggtgtgggactgtcagctcggcgagtacctgctgcacggcatgacgcaagagttccacatggcgagcatggacgagacggctcctcgctacggcggcaacctgaaggacgacgcagtcaagtccctgtgggctgcgggcgtggacacctgcgacatcgacaagacgttgctgatggattacctcctcggcaccaacgacaccgacgacgtaggcgacatcggcaacaccgagaagatgttcctcgggcagctcgccgccttccgtgcacgtggcggcctgcgctcggcgctgctcaacatgggcgcgctgtgcttcaccatcgaagccgagtacaacggcatgtacgtggacaaggactgggctctcgcgaaggcgaaggagttggaggtcgagctggcaacagcgacggccgaactcaacggcttcatccccaagctgcccgagggcctgaccttcaactggaacagccgcttccacaagagcgcactgatcttcggcggcaaggtgaagtacacggcgaaggttccgatcatgtccgccgaaggtggcccgacctacgtccagaaggacgaggtgcactacgtgctggtcgatggcaccacgactgcgacgccaccggccgaggacttcgagaacgtggggcggtacgtgacctacggaagcggcaagaacaagggggagtacaagaccaagaaggtcaaggtcgatgacctgaccaagcagaagttccgcaacgaggacatgctgttcgagttccccggctacaccgagccggatgctgcgtgggaaagcaagagtgatccgggtgtgtactccaccgccgccgatgtgatcgaggcgctgagctaccgaaacctgccattcaccaaggcactggcccggcgcgccgacatccacaaggacttgtccacgtactacatcacgacggacgagaagaccggcgagcagaagggcatgctcaccctggtggggccggacggtatcatccaccacaagctcaacatgaccaacacggtgacgggtcgcctgtcatccagcgatcccaacttgcagaacgtgagcaagggtgagctggacgaggagacgttggaggagaagggttcgcagatcaagcgcgccttcgtgtcccggcacaagggtggcaagatcatccagtcggactacacctccctcgaaatctacgtgcaggcaatcctcaccgagtgccgtcagctgatcgaagacctgaaggcgggcctagacatgcactgcctccgtgccgagcaggcgtggggtgagcaaggcaagtacgactacgacttcatcctcaaggcgagcaaggacgacaagcatcccgagcacaagaagtggaagaagaagcgtggcaacgcgaaggtgttctccttccagcgtgcgtacggtgcaggcgtggcgaagatcgctgcgaccaccggcatgtcggaggacgaagtcgaggcgctggtgcgcggtgaggccgagcgttacccggagctgggtgcgtacatcgaccgcatggtcgaggccatcaagcgcaaccgcgtgagcaccaaccgcttcgttccgcacccggacgcaggtcgccagggtgtgcccgccgggctgacctgtcagctgggccggtctcactggaccacgccggacggcaagatgtattccttcagcgagtcgccgtccccggtgttcatcgccaacaagcccgcgagcaagggcggctgcgcgcagtcgttctcgcccacggaaatcaagaactacccgatgcagggcaccggtggtgaatgggccaaggctgcgatgtacgtcagcctgcgcgccttctaccgcaagtacgttaccgaaccgaaggaatggttgggccgtgcgctgctcgtgaatcaggtgcacgatgccgtgtacgtggatagccacggcgacatcgcaacaaaggccgctgctctgctgcacgcctcgatgctggaagcgtcggtgtacatggagtggtggttcaactggccgctgcctctcggcgtcccgtgcgaaaccaagatgggcgacaacatgatggaggagaagaaccctcccgcagagttcgccggtctggtcatcgagtaccgatcgtcgatccgcaaggacttcgtaggtaatcacaacccgtcgtttgaacaaggagaactacacgcatgagtcttgacgcactgttgaacaaggtcgccacccagggcaaggatcagtcggtcgccagtggtggcagcttcgactacaccccgcccgctgccggtgtgaccaccgcccgcatcgtcgggtactacgaacagggcaagcacgagttcgagttcgaaggcaagaagaagacgcaggacgaagtcgccatcgtgttcgagctgaccggcaagcagcacccgcacatcgaaaccgacaacggcccggtgccggtgcgcatgaccctgacgctgggcctgtccaccaacgagaaggcgcactacttcaagatcttcagccgcctgcgcaccgaagagcgccacttcgtgcagctgctgggccagggtgtgctgctggaggtcgtccacaagaagggcaagaaggacccgaccaaggtgttcgccgaaatcgacaaggcttcgatccgcaagccgatcatgccggtgccggagatggagagcggtatcccgaccggcaagttcgtggacaccgtgatcccggtaccgcagcagatcaccccgctgggtgcgttcatgtgggacttcgccgacgccgagatgtgggacagcatcttcatcgaaggcgagtatccggagcgcaaggacgagaagaccggcaaggtcatcgccgaagcgcgcagcaagaaccgcatccagctgaagatcgcctcggcgctgaacttcaagggcctgccctgctacgactacgccgccgccaagctgtcgggcagcacgacggtcaccaaggaaggcatcgacgccctggacgaagtggtcggcgacgtggcgcaagccccggccgccgcaccggccgaggacaagccgccgttcccgatggacggtaacgacccgatggcgggcatcgcctgatggacctgagcgctctcatggctgcggctggtgagcgctccccgatgccggtgcaggtggtacgtcagcacaacccgcgcgtgatcgctcacgttgacggggactacatggcgtacttcgcggctggtagcgagaactgctcggcgggggatgcacggcgcaacgtgctctcccgctgcgcacagctgaagcacatcagcggagcgggcaagatcgtgatgcacctgacgcatgccgcgtctaccaagggtgatcgcttcctcgctgctaccacgcagccgtatcagggtcagcgccaagcaggccgcaagcccaacaactgggcgttccttcgtgagtggatggagacctacgagggcgacgctttcactcccaaaatctggctgactcgcgaggccgacgacggcatcgcatacgtcaacgagggtgcagcattgcaccacaacgtactgcacgtggtgcacagcgccgacaaggacatgcgaatgttctgtggcgttcacgtagactgggatggctacggtatcacggaggttccgctcggcgcttacgacatcgtgggcgagaacggattgcagtacggtcacaagtggttctggatgcagatgctccacggcgacagcgccgacaacataccgggtctgccgaaggttggcaaggtcaaggcggagcagctgcttctcgacacgaaggacaacctcgaagcggtgcagctggtgagtggcaagtacagcgaggtgctcggcgccgactggcgcaagaccttcgccgagcaggccgtgctcctgtggatgcggacggatcgcgacgctgaactgctggacgtgctgaagctcgacgtgttcgggccgcagctgaagcaagcattctacgacctcgccgaggacgtgaacgagaagcgcgcaatcctggaggcatacaaagcatgagaacgaagtggacaataacgtgggcgtggatcaagtacacgcccaatctccggtgggaaaccctgaagtcacggtaccaatcgtggcgttccgttatcggggactacccatggtgaagcgactcactgcaacgcaagtcaagctgctgcgcatcaagttcgcagcggagcagggcaaccgatgctgtctctgtcaggggcagttcggcccgaaggctccgctcgatcctgtcctggaccacgaccacaagaccggcgctgtgcgcggggtgctccatcgcggatgcaactcgctgctcggcaaggtcgagaacaacgcaggccggtacggcgtgcgcgatgtgttcgcattctgtgcgggcatccccaactacctgcggtcccacctaaccaacatcacggggtacctgcatcctacctacaagaccgacgacgagaagcgcatcgctcgcaatgcgaaagcgcgaaagcgtcgggcactcaacaaggagacaccgtgaccctcacacagttcattcgccgagcaccgaagcgcggcccgaagattctctgcctcgacatcgagacgttccccatcgagttctacggctgggggatgttcaacaacaacttcagcgtcaagcagatcaagcgcgactggtcgctgatgtcgttcgcttgcgaatggctggacgatgaggagtcgttctacatggaccagcgcaacgtgcgggacgtgttcgatgatcgcaagcagggcaaggcgctgtggcacctgctcaacgccgccgacttcgtgctcgctcgcaacggcaagaagttcgatctgcgcaagatcaaggcgcgcctcgccatcctcggctttccgcctgtgtcgcctgtgcaggtgatcgatccgctgctgctgaaccgcgccgagttcgcgttcacctcgcagaagttggagtacaccaccggcgtgatcgtgccggagctgcgcaagtacgaccaccacaacttccccggcttcgacctgtgggtggcctgcatgcagaacctgcccggcgcgtgggacgagtgcgaagcgtacaaccgcatcgacgtgaagtccatgaagttggagtacaagaagctgcgcggctggtactcgcagcatccgaacgtcgccgtgtactacaaggccgatggcagcgagcaccgctgcaacaagtgcggctgcaaggaaatgatcccgcaggatgatccggcccgcacgcaggtcggcacgtacctcctgcttcagtgcaccatgtgcgatggcttcagtcgtgggcgcaagctgacgaccagtgccgaagcgcgcaagcacatcaccgtcccagcataaggagaagcgcatgagacttaccgacgttcgccacggcgaccgcgttcgctacaccggcactgccccgggcctcgtcggtaagtccggcgtggttcgttcgatcagtgcagcagatgttggtgttctgttcgacggccagctgtacgactccgcgatcaagccccagttcctcactcgcctgatgagcgtgggaggtatcaccaccacacacagggaggttccattgcccgagcaactgaactaccgtaacgaggacgagcgcacgtcgtccgaccggggcgtcggcctgaaggatgacggcggcaagccgcaggcgcggctgctgtacgaaggcgtgccgcgtgccctggcccgtgtcatcgacaccctgaccttcggtgcgcagaagtacaaggcgcactcgtggcagttcgtcgagaaggcggccgaacgctatcaggatgcgagctaccgccacgacaacaagcgctgcctcggcgagaagctggacccggagacgggcgtccaccaccgggcacaccacatcatcaacgagctgttcctgttggagctggaactgcgcgaggaggagaagggttgacggcctgcgtccgctgcggccaagtgcatcggtacgtcccacatgaggccgagtgggcgcgcttcgtagaggagcaccgtacccgcaagcaattcgatgtcgagtgggcgaactcactccaccatcgcacataccctgacgacgccttctgcatcctcgtgatgaaggggcgcgcaggtttcgttccattcccgtcgaaggagaactgaatgctctacaagaaccagaccgccatgctcatcaagtcctacgagaacaccgtggcgtggggcgagagcgccgaccacgaggaggcgttgcagaacgcggtcaaggcgggcttcccgaatctgccggaagcagaccaggccgaactgtacacccgcatcgccgaccagtgggaaggctaccgtggttcgctcgccccgcgcaagctgtggatcggcaccatcgtcaaccagttcatgtcgtcccgcatcgctcggttcaacgccgcgctgggtgacggcaccgctgcaaccgccaccaccgccgtaaagaagaagggtgcgaaatgagctacatcgtccacaaggcagtcgagcaggacaaggtaaagaagaagctgcggcccaccgaggagcagctgcgcaccgagtacatcgcccagccgaagtacgacgggtgcaacatggtcgccatcaagcgcgggcactgggtccccgccgtggacaagggcatgcacgccatcaaggtgaacgactggcagatgcaggcggtggatcgtggcgtggttgacctgttctcccgcaccggggagcaggtggtcagcgcgcaccacatcgagaacgccctcgcagcggcgccgttcttcccggtcggcgtgtacttcggggaatactggcacccgacaatcgaccagcccaccgtcagcggcatgttccgcaagaaggacggcacgcagtacaccgagccgatgttcgtggtgttcgacttcgtgacgctggaagagtgggagcagggctacagcgacctcgtgtatcaggagcgcgtcagtcgtctgccgatcctggggcactccatccccgaaggcgcggcgcccgtgttctacgcggagtcgcagggcttcctgatcgaccaagacatgggcagcatggaagcggcgaagctgctgtgcgagggcggcgcgtacgatggcctgatcctgcgcaagccgagcggcaagtggatgaagggcgacaagggtacgaacggcgaagtcatcaaggtcaagccgaccctgacgctggacctgcgtgtggtcaagatcaacatggctaccggcgagaagacggggcgcgatgtgtggaccgtggtcgttgacctcggcgatggcaagacgcaggaggtcggcagcggcgtgccgcacgattccgctgcgctgccggtcgagggagacatcgtggagatcgaggccatgtccttcagcaagtacggtctgctgcgcgagccgcgctacaagggcatccgccacgacaagacggaggccgacctgtgatcatcgacctgggcgagttcaagcgcaagagcggggatatgacgagcatccgcgccaccgtggacggcgaggtgttcgagttgaatcgggtgttcgatccaacctacgaggaacacttccgggagcacatccagcgcggcatgttcctggaattgatggagcatatctacgacaaattcatgaaggagtaaacgatgctttcgcaagtggaactcgaactggaaacctacgccttcggtaaggagcgcatggagaagtccatcgcccgtaacgaggagaagggcggcgcggacaacaacccttacgcccaagcagtgtaccgccggttcgtgcttccgcttgcggagcgcatccgcgcagacatcgactccccgcgcatcggacgtgcccaggcccacgtgccacttctgcgcgccaagtacgatccggagcgtcagaacaagcgtgggcagcccgtgagcgccgaggaacaagcccgcgagtggtacgaggctgtggccttcgtcgccgttcgcggtgcccttaccacctgcatgcgtgacaagcacggcgaaggtagcgaccgagacgtgctgaagagcgttggcaccaacgtgtaccacgagtacctgttgacgcagttcgccgacgctaagccgaccctgttctaccacctgatgaacgacatggaccgcaagctctctgtcaacgagaaccaccgcatgacggtgatgaagatgcagggtcgcaagaacggcgtcgagttcgtggagtgggggcaggcgcagcgcgatcaggtcggtgcctacctgacggatcagctgtcgcagctgggtatgctggaaatcggcgtgctcaacaacacgcagtacaaggacggtcggcgtacgcacaagaccgaggtgaagataatgctgactcctgcggtgtcctcgctggtgcagcagatcagcgacttcgtgatcgaggctactccgttcttcctgccgtgcgtcgagccgccgcgtgactgggtagcgattgacgatggtggtttccacacccaggagatgcgccgcctcaacccgtggatggtcaagacgtatgcacagacccgcgacgactaccgtgatgcgggactgaacaacgagatgcgggcgatcaacgcattgcagcgcgtgccgtggcgcatcaacaagcgcttgatggaggccgtgtccagcatcgccaaggtgcacgacatggacgaaatcattgcgcagggtgaactgcccaagccgcgcaagccggactggctgacgaaggacatgaccaaggaaacgatgtcgcaccagcaggagctggacttcaagaagtggaagcgcgacatggcgaactggcataccgacgagcgtctgcgccagaacaagggcaatcgattctacaacgcaatgaaggtggcgcgcaagttcgccgagtacccgagcatctacttcgtgtacttcgcagacttccgtggccgcaagtacgttcagaccaccggcgtctcgccgcagggttcggacttgcagaaggcactcttggagttcgccgaaggcaagccgctgctgacgaaggacgcgcaggattggttctgcatcacaggagcaaaccgatggggttacgacaaggcgtcgctgccggaccgagtgaagtgggtgcgcgagcatcacgaccagatcatggccttcgctgcggacccggtgaacaacgacgagtggaagacggccgacaagccgttgcagtttctgagctggtgcatggagtacgagcagtggcaaatattcggggatcgcttcctgagccgcatcgcagtcgggatggatggttcgtgcaatgggcttcagaacttctcggcgatgctgcgcgacgcagccggcggggtggcgacgaacctgatcccggcgctgctgccgaatgacatctaccagatggtcgcagaccgcgtgactgcgatcctactggccgagcaggaagacgaggcagggttccgcaccctgtggctcgaccacggcctgacgcgctccctggtgaagcgcagcgtgatgaccctgccgtacggctcgaagaagtccagctgggcagacttcatcgtggacgactacctgaaggaggggaagttccccggcctcgacaaggcgctccacatgcccgctgcgcgcttcctgagcatccgcatgggggaggccatcgccgacaccgtggtggccgctgcgggcgcaatggcgtggttgcagaaggggtccaccgcgatcctcaaccagggctacgaccgcatcaagtggatcaccccgtccggcttcccagtcacgcaggtgtactgggaatccgacgagcaccggatcaacaccaagctgtgcggcaacgccaagctgtcgatccgcaagagcaccgacgaggtgaagaagtcccggcaccgcaacggcatcgccccgaacttcgtgcacagcctggacgccagccacctgaccctggtggtcaacgccgccaaggccgagggcatcgacgccttcgccatgatccacgacgacttcggcacccacgccgccgacagcgcggccctgtaccgcatcatccgggaggtgttcgtgggcatgtacgagcggcacgacgtgctctcggccttccactcggcctacccgttcctgccggagccgccgccgatgggcgatctcgacctgcgccaagtccttgattctccgtacttcttcagctgacggagtttcagtacacctacagctgagagggtggttggagcggccgcgaaggtaagcggaaccggtgccacccttttggtacacctacagctatgaggagacaccgtggccgaagacgccaaagtgaaagtcctgatgacgctgcacccgaaccagcttgccgccgtgcggcgactgtccgggctgtcgctgtccgtcaactcgaataccacgcccttggaggcaggtatgcagttggggatggctcgcgtcctgaacatcctacaggagggtttcaccgttgattcctccctacagaacaccaacgacgggtgatagtgagcagatcaaggcggctttaacggccgctttgtatctgtcctctagagaagatagtaaagtagacaatagagaatcctctgtaagctacaactgtgatgatcctgattatacagtagctctgataactcagaacttagtagatgcagtaatcatagatgaagcttatctactatgctttgccattgtcacaccgtggtattccaagaaccgtactacgttcgttgagaacatggtgctgcgaattgggccgggcagttccttcgaccggtacatagccgtgatggaacacttggctgacatcaaccactgcgactcactgagtgcaggtggcgcactagctcggaactcccgagcactcacacggatgtatgcacgctacggctacctgctggaacgtcatgctccccaattcaccaagcgaaggagttaacctatgggtagcatccttggtggtggctctgcgaagaaggctgcgctgaagcaagcggcggctatcgacaagcagaccaacctccaaacccaatccacgaactaccagatccaggcgatggccgatcagatggctcaggcagctgcacagcaggccgcatccgagtacgccgagaagttgctgagtgcccctgtcgataccgtcgatgtgcggctgggtacttccgacctcgacttgcagaccgccgacttgatcggccgacgcaagaccgcccgctccgcctacacccgacccgtgaccacgaccgcagcttcccggctgacgactgtggccgggtcggacctgttgtgaggtgagcatggaccactcgatccaaaccgcgcatcgccagttcgaggcgtacgacaacaagcggaacggcatcatgtaccggctcgaacgatattcgagctggactgtgcccaagctgttccctcgcaagaaccgcgaccaggacaccgagccgctgagccacgggttccagtccctcggcgcgcaggcagtgaaccatctggcgaacaagctgatgatgtcgctgttcgcaccatcccgaccattcttccggttggagatgaagcgcaaggcgcgggaggcagcgcaggatcaaggcctcgacttgcaggctatgcaggcgatgcttgcgaaagccgagcaggatgcgagtctcgaactcgacaagcgctcgatccgctcccgactgtacgacctgctgaagatgctgatcgtgctgggcaacgccctgatggtgttggagaaggacacgatccgcgtgctcaacatgcggcactacgtggtcaagcgcacccgcaccggtgaagtctacgaactgatcatccgggagaaggtgcacaagacccagctggaacccgcagcactcgctgccattgtcgcacacccggacttcaagccggatgatgacggcatggtgtgggagtacaagtggctcaagctggaccaccagaccggcaagtacaacgaagacgtgtggatttgcaactgcaagctgcccgccaacttctcctcgtcctactccgcagacaagctgccctaccgggcggtgagctgggacttggccgcaggcgacgactacggctccggcttggtcgaggactacgaggcagacttccagtcgctctcgatgctgtccgaggccgcagtgcagggagcgatcctcgcatctgagttccggtggctggtgaacccggcaggccagacctccgtcgaggacttcatggcatcgcccaacggcgcggccatccccggcatgaagggtgacatcgagctgatcaacgcaggcgtcgatggcgtgctgcaaaccaaccaagcaatccagtccacctacatcaaccgcatcggcgcaggcttcctgttgcagacggcggtgacccgtcaggcggaacgtgtgaccgcgcaggaaatccgcatggtcgccgaagaactggaaggcgggctgggtggcggctactcccgcatcgctgcggacgtgcaggtgcctgtcgccttttgggtgatgaacctcacgggccgcgacatccggggcaaggacttggagcctgtcatcatcaccggcttggccgcgctctcccgaacgggtgaccgtgaccggctgttggagttcggcagcaacctcgccaacgtcctgtcgctaccgccacagatcctcgaacgactgaagctgtccgcgtggatcgccgacctcgccgccgctggtggtttggacccgaacgtctacgtgctgactgaggccgagtacggccagatgatgcagcagcgtgcgcagcaacagctggtcatgcagaacgcatcgcagcagatcgacaacgccaacaacatggagacacagacacaatgagttccaatgcacctccgggcggtggtcccggcgcaaccgtgatcgcaacctcgcaaggcaaccagaccgcaccggcagcccaggctccggccgacgacaagctgctgaccggcggccaacccgcacaggcgcagcccgcagtccccgcagcacctccggcggttgacgcgctgagcctcgaacccaccgcgcctgcacagaccaccgctccggcggccgctgcgccaactgctgtgtcgattccggactacggcgacaacggcctgaacatcgcggccgaatacttcgtcaacaccgtcggcctcgacatcgacagccgcgaactgaccgaagcagcgaagggcaacttcgccctgctggaagccaagctggaagtcctgggcgacaaggccaagggttccgcaccgatcctcgctctggcgaaggaaagcatcgctcgcgtcaccgccgctgcaaccgcagcgcacagcgcgaacgttgctgctgtccacgaagccgtgggtggcgcagagaactgggctgcgatccagcagttcgcacgggccaacctgcccgccgaccaactgaagcaggcaggcgaagcgctgtcggccggtggcttcggcgcacaggcgaccgcgcgctacctgatggctctggcccaggccaaccccgcgacgaccgtcaagggcgcaccggctaccaacgccgccgctcctgccgcgtcgatcaacggcgtcgctcctatcacgaaggagcagtaccgcgctgagtaccgcaagctggttgccgagaagggcatccgtggtgcggcccactccgaagaactgcgtgcactcaacgcgcgcgtcatccactaagacccaaggagcaacataaagcatgagcaccatcttcccgaccgtcaccgttctgccgaaccaggtcaaccagtccggcaacgagaacgccctgatcctcgaacagttcaccggcgacgtcgagcacacctacgtgtccagctcggtgctggaaaagttcttcccgcgcaagcaggtgaagggtaccaacaccctgaccaagaaggccatcggccgcaccaagctccagaagctgaagcgcggtgacgcgccggacggcaccccggtggacttcagcaaggcgtcggtgaccgtcgataccatgctgctgtcgcgtcactccatctggcagctcgacgagatcttcaccgacatcgacacccgcaaggaaatcgccatcgagcagggccaggagatcgccgagttcgtggacctgaccatcagcatcgctgcggcgaaggccgcgtcggccacccagtccatcttcacccgcaacggccgtgcgccggaaggccacttcggtgccacccaggtgaccctggcggcggcgggcgacgagaacgatccggccaaggtgtacgcggccatcggcaagctgttctctcgcatggaagaggagaagaaggtcaagccgcagcgcgacggcgtcgtcctgatcgtgcgcccggcgatcttctacctgttgcagcaggccgagcagatcagcaacggcgagtacctgacctcggacggcaacaagctgaccggtatcccgaccttccacggctggggcgtcccggtgctgtcgagcgagaacctcccgaacaccgtcatctcgggtcacctgctgtcgaacgacgacaacgacgacttctacgacggcgacttcagcaccctggtcgctgtggccgtgtcgccgaaggccctgatgatcgccgaagcgctgccgttgcagtcctcggtgtggtggagcgacgcctcgaagtgcttcttcgtggactcgtggatgtccttcgccgtcggcctggatcgcgtcgagaacgcgggccgcatcgacaaggctgcctaacccgctgggcgcggtccctgaatccttcgggtaactcaaaccgcgccttgccttccaccaacacaggagcaccatcatggtctttgaccgaccgttcgaaatttccaaccgtgtcgtcgccgcaactggcgtggccggtctgcccgccaactccgtgggcaccgtcgtcggcgtccactacaacgccatcggcacggcctgggtcgtgcgtgtccgcttcgtcgatgacgaaaacggctcgcaggacgtggagtacgcaccggcctcgctggccctggctgcgaactaagcaacatcctggcaggggcgctccggcgtctctgccttgttcctctcaggagacaccatggcattcatcaccaagctcgacatcgtgaacgcctgcatcaagacgatgggcgagacgaagctcaacacgctggaagaggaccacgtctacaaggacgacgcagttgacctgatcgaccgcgtgcaccgcgacgtgtcgtcgctcgcgctgtggttcaacaccgaatgggtggagctgaagccgcaggcaacgagcaagtacatcatggtccccacggacgtgctgaagctggactgcaacccgagccgcttcggccacgtggtgcagcgcggacgccgactgtacgaccgcaagcgcaatacctacgagttcgatcacagcgtgcaggccaagctggtccggctgcttgacttcgacgacctgccctacgaggtgcagatgttcgtgcgggacgacagcgtgctgcgcttccagtccgacttcgatggcgacaacaccaagtacgccaagatccagcagcagcgcaacgactcgtggatcaacctgaaggccgagcacatccggcagatcaaggcgaacccgctgttcgcgcgcgcatccgtggacgttctgcgtcagcggtacttcaactacagcggacacccgtggcatagccacgtcactttccccggctaaggaggcatcatggcaaaggcaggcggaacctatcccgacatcctacagggtgtcagtcagaaaccggcgcatcgtcgtcgggcgggtcagacgcacgagcagatcaacgtgctgtccgatccggtgaatggcctcgtgcgccgtcgcggtacgcggttcgctgctgcccaagccgttgtcacctcggccgaactgcgcaacatggacgtgttcgatttcatgcaggagggcaaggagtacgcgctgctgtatcggcgcgacgcctcgtcgtccagcagtgcgacgttcgcgttcctctacaacaagacggacgaggcgttcatcccgttggtctacgagaacagcacgtgggtcaacacgttggtcagcggcggcgcgtcctctctcgcggccatcggcagctacgtctacatcgcgggcaacaccacgatcccctcggccaccagcaccaacgtgtggcaggagcagacgaacatccagcgcctcgccgcgtgggtgcgcaccggcaagtacaacaccacgtacacggtgaacctgacgcgcacggacaacacggtgctgacggtgacgttcaagacggtgaccgcgtcgtaccccggcacgctcgacacgagcgacatcccgttctacctgcccggcggcacggagccggacgcggcgtaccagaagcacgtcaacgaccgagtgaacgagtacaactccgcggtcaacgagtggatcgtgaccagcgccgagcagacgcgcccggagtacatcgcggagaagctgtcggatttgctggtggacgcaggagtatcttcgacgtacatcaagggcggtatcgtcattgacgacgaccagttcaaggacatcacggttgacgacgagggcgacggcacgaccttctacgccgcagggcaggagattaccgacgcgacctacgctgtcaagttccactggcacggcaagatcatccgcgtgcgcccaagcggtgcaggtgctgacgagacgtactacctgcgcgccgagttggagaacggcgagacttctggctacggttcggtggattggtacgaagcgcctggcgtggagtgcaccatcgacaacctcgtgtcgcagctgtacatctacaacggtgtgggctacatcgcacgcaacggtgcgggcctcacgtccctggctccgggcagcggcgcacacccggcttacggttcgcgcgtcgcaggcgatggtctgacctcgccgatcccgtggttcgtcggcaagccgatcacgatgctgtccgtcttccaagaccggctgatcgttggcgcgcagaactacgtcaatgcgtcccgctcggcggactacctgaacttctggcgcggctctgccgtaaccatcgaagacagcgaccccatcgaaatcttcgcgcacggtagcgagggcgacgtgctccggcacggtacgctctacaacggcaacctcgtgatcttcggtgaccggcagcagtacggcatcagcggcgactcggtgttcagtccgaagaacccgctcatcaaggcgttcagtgcgaacaaggattcggtggacgcaaaggcgcagacctcgggcaactacatcttctacgcgcagtacggcagcgaaggtacgagcctgcaccagatgcgcgtcggcgcactcaacgggcagcagacggttacggacgagatgtccaacgagctggactcgtggctgtcgggcacgccgttgcagatcaccgcactcaccgcaccgaacctcgtgatgttccgcacgcgagagcacccgcaggacttctacctgtaccggtacgaggacaacaagaacaacgggcagcgcatcgtggacgcttggtcgaagttccagtaccacccggcgctgggcgaaatcatcggcatcagcagctacaagaagaacggcctcgtgttcaccgcgcgcggatcgctggtggcgtgcgacgtgttcgatccgaagggcgagccggactcgcatgcgtgcctcgatagctgggcgcgtttcggtacacctacaggcgtactgaccgcgagcgcgagcatcgccgtcaacaagactagcccgtacttcctgctgggttgtccctacgctcaggcgtccgacttccttacccagttcgatgacctcgacgctgatgcgttggagtatggcgtggtgtccgaggcgctggtgattccgaccaatccgttccctcgggaccagaacgggcaggctgtgctcgacggccgcatgtcgctgaacaaggtgacggtggacgtggaggacacggcgggcatgctcgcttcggttaccacccgcaacgggagcatgaccaccactgacttcgagggccgcatcctcggcgactccgacaacctgatcgcgcggcaaccggtgtaccgggggcagctgaacatcagcgtcgggcgcgaagtgcgcgagtgcacctacgagattcgcagcaaggattggctcccgctccgggtgaccggcctcagctggacgggtcagactttcaacaatgtacggagggttagctaatgggttcggttaatacgatcctgcaagcgaacaacaccacccgcatcgctcgtgcgaactaccgtgcagccgttgcgcagaccgacaacacgaaccggagcgaggtcgccaagactggcttctcggatttcatgcggtccctgaagaacaacgcccagctggacgccgccgccaaggagtacaactccaacatggaggcgctgtccgaggagctgcgtgcacgccaaggggctgggcttaactcccagctccaactggcgaatgctcgcggtgcgttgcaggcgcaggccggtgctgtcggtgtcggcggctcgtccgcagacctgatggattccatggtgcgcttgcaagcggagatggacaaggagacgcaggacaacgcggtggcactactcgcctctcgcggtgcatcgcagacggcgcaggtgatggcgcgtgcgtggcacgggatggacatgagccgcacgttcggccagttcgactacgcgcagcatatcgagccgaaggcaatgaagcgtcgcttgggcaagctgatcggcgtggccgtggctacctacttcggcgggccgatggcaggcgaggccgtggcggacttcgcagtcggcacgtggcaggcggacaacggcaacttccaaggtatgtcgcagtccttcaacaacgcagcacagaacgggttgcaggcgtggcagcagtccaacgagcgcggcggcaagtcgtgggcgtctactaccttcgggtacaacgacggcaccggcaagcagtccgtgacaggggcgaaggtcaccggcaacttcggcaacaactacgacaacttctccaccactacgtccggcctcggctggttcgatagcggaagcggaggcaactcaggaggtgcatggtaatggctgacatcggcacggttaccttcaacacgcagtccgcattgcagggtggcatcaacgccacccccgcactgtcgggcaacaccagcatccaaggcgctggtgtgaatcaggtcggccccgttcgctcggggtcggattggttcgagagcactggcggtatgacgatgccggacagcaacctgcccgagttcttgcaagaactggcctcgccgaacaccgccaagctcaagcagcagcagatgtgggacggcttcgttgccgcccgcgcgggcaagaccatggacgagatcgctgcgaccgagccgtggtacaagaagatcttcggcgacaccaactacgagatcggtgcgagcatgtacaacacgctctcgcaggtcaacgagatggagagcgacctgctgcggcgcatgccggagttgcgtcagctgccgcccgaggcgatggcgaaggagttcaacgaactcgccactgcccggatgaccggcaacggtttcgcggacacggtgttgcagaagaccttcatggatcgtgcgggttcgctgatggacctgcacacgaaggagcgcacggcgtggcagcagcaggagctggtgaaggcgcagtacgctgcgaactcgtcggcgtccaccggcttcaacgaactggcgaagcgcacggcgatgctcggcaccaaccgtcccatggacgagaaggccaccgaggcgttgacccaggcgcagctgtcgctgctcgacggcctgtcgccctcgcgctaccagacggacgagtcctacaagtccgcgatcacttccttctaccgtggcgctgcggatcgaggcgagttccacacgctgaagttcctcaacagcaagggcgtgctgaacgccatcgacccggacgggcagctggggatccagcagtacgtgaagcaggcgcaggatcggtaccgcgcggactggctcgacgccaacccggagcaggccgagaagatggcgctcgtctccatgtacgcatccgagggcatcggtgccaagccgtcccaggcgatgatcgaggaaatgaactccacctacgccgctgagactggcagcgacgcaccgctctactcgggcacgcagctcgcctcgatcatggcacagtccgcaggcgcacacatccgcgcccaggaagccgtcatcaaccagcgcaacgcggcggccaaggctgcactgacggaccagcagaagttggctgctcaggaggaggacatccgtggtggcatcgaggcgttcaagcgcggcacctacgcgcagacgatcaacattcccggcgtggacaaggagctgatcgaagccaacacggtccaggcgtggaacgacacgatggcgaagaacccgaaggtcgccatgtcgcagctggtgtggaacgccaacaccggacgcggcgccgtgctcaagggcgtggccgaccagttccagaccacggcgcgtgccgtgctgcgcgaccagccgaacacggcagcggctgcgctgtaccagcagtggaaggaacttaagcagaccaccgccgcacgcatcggcactgacgggcagcctgtgcagggccgactgaccggtgcgactaccgccgcgctgtacttcggagatagcgtcaacacgttcttcaacaagctgcaagcgttggagaatggcggcgtgaacttcgagcttgcctacgaggtggcccgtggcgaaatcaccaccgacgatcccacgaagttcgacgcggacagccgtaaggaatccgaggctactcaggctcgtgttactcaggctatcgcaaagctcaaccccaagtacctcggtatgttcggcaacaagcttggcgactctggccgcgctgcgtatgctcgcgccatcgtccgctcggtcaccgacaccggaggtctgctggacacttctgcggaaggcttgcaggctgcggctactcacgccaagctggcctacggtctggaagacgcgggcaagtacgcatgggagaacgggcgtgacgacgagggccgagtgatcggcggcgtcggtgcgtggctgggcttcatggacacgaaggagacgggaccggctatcgagaaggctatcgacgcagcactgcgccgggtcaacatcgagccgaccaccggcctgaaggccgacgtgttccgcatgaaggacagcgagactggcgagcccgtgctgtacgtcaacgctgttggcgagaagggctggaaggttgtgccggtgtacgggcgcgacatcaaggccgagtacgagaagcacacgaaggagcagcgtaagttgcaggccccggtaccgcagggctacgttcgcatgaacgacggtacgattcagcagagcatttccatccaacccaaactgtaaggagatagacaatggcactcgatctttcggggctgacccaagaccagcagattgccaaggctgccgcttatgcgggagtgccggagtccgtcgtacgtggtcagtggcgagtagagtccggcaacgggcgtgccgccaaggacgcggacggtattatccgcagcaaggcaggtgcgcggggtgacttccaagtcatgcccaccacgcaggcaacgtgggaagcgcgcaacggtcgcaagtacgacatgcgcaacttccaagacagcatcgagctgtacgccgacatcatgcgcgagaacatgcagctcgccaagggcgacgtaaccaaggctctgcgcatctaccagggcggcaccaacccgaagaactggggacaggagaacgcggcctatgcacccagcgtgctgggcggcgcctcggctcctgctgtgtcggcacagccgcgcagcctgagcaccacacaggcggacctcaacgctgcgtggcagggcaacccgaacatgcgcgaccgcacgtggtccggtgcgtccatcccggatgcatggaccggcgctcccatcgaaggccgcaacgccctggcgtcggctgcgaaggaacacatcggcaagattcgtgcgggcatcgccgagctgtcgatggggcagatcgcgcaggaaggtggcaccgccgagcaggccgtgggccgggcgcaggccgtccgtgcatcggatcaggttgtgccgtggtgggtgcgccaggaagtggactcgctgaacaccggcgcccgcaaggcgctgctggatcagaccgagcaagcactcgcacaggatcgtgcggacgaagagctgcgcaactcgctgacgttcctcgacaagtggggcgcggcgttcgatagcggcatcggtgctgcgatcagcaaccagtttgcacgcgaagaccagaacatccccgagggctggaagtacgacccgaaggaatgggagaagccgtggatgactgccgacgaactggaagacatccgcgacgcagcgtactcgccgaacgagttggcttacgtggccgaccggcagttcatgcggcgccactccatgcggatcaaggatcagcagaccggctggtcgagcttcggctacgacctcgtggcgggattcaccgatccgggcaactgggctatcggcggcgtcaccgctgcgggtgccaaggtgctgggcgttggttctgctgcgctggtggccgagggccgggtgggtgcgtcgctcgcatctgccgctgcggagaacgcggtcggttccgtcatcacggacgccgcactggtgagcctgggcgagcgccgcaacttcgcggacttcatgaccgacgcagcattcgcaaccaccatcggcaccgcgatgcacattccgggcgtgcgctcggcttcgcagattcgggacaaggccgccatcgacctgtccgcaggcaacgctgccgcttacggcgaagcgtggtcggctgacctgaaggcgcgcgctgtgtccgagctgggagagaacgcaaacccggtgatcatcaacaaccgagtccaccagcttgcgaagcaggaggccgtggactggctgcgcgccggtatggctgacgtgcctgacgacttccgcgtcttcgcacgccccgacgtgcaggagacgaccaccaccgcaggtaccaccggtacgctcgcgcgtgacgtggacaacgtggactccaccaccggccggtacaacgacaccgttggtgggcgggcggatcagcacgacccgctgttggagcgtgcatggaaagctgccggtatccagggcggcaaggtggacggcgtactgaagtacctcgaatccaacgcatccatcccggaggacatgcgggctatcgccaacgcgctgaagcgtggcggccgtctcgacagcgtcaagatcgtgccggagcaggagctggacaagtggttcgctggtgccaaccccggccccggcatgaagatcgcaggcgggtacaacccgagcctggatgccatggcgatgcggaactacaacccggagacggtgctgcacgagatgctgcacgccgctactctgcgtgagctgcgcagcaacactgcgttcgggcaggagatgcaagacctcctgacgcacatcaacagcagcctcgacagcgtggactctacgctgaccaccgccgcaatggagggccgtgtcaaccagccgcaggcgggattcctcgccaatacggacgagctgatttcctacggcctcacgaaccgcgctgtgcaggcggtgctgcgtcagatgcctgcgccaggaaacacccgaccgaatgcgtgggagtggctgaaggacaagatcgcgcgagtgatgggcctgaagaaccaggagtccgcgctcgaacggctgatgtctgtggtgggcgagaacgttggcgcggaggttcgggacacgcaggtgcagacccgccagactcgcggtatgctcgccaactcgatcttcaaatcgaaccgcgagcgcaaggcgttctaccagcgcacgggtctggacaagtccgtgagcgacgacgcgatgcgcgtgcaggttgctgaggtcatggctcgctccgagcgattcagtgcgaagtacggtatcgacgcagccaagctgtccaccatcatgcagcgcttcgggctggaagctacgagcacgaccctgatgtcgtcccagtcgccggtcgcgcgtatgctcgcggtcaccctgttggagaacccggagggtgcggcaggccgacacagcacggcggcgatggatcggcacggccggttcgagtcgttcatgggtacgcggccgcgtcagtgggaagcggcctaccggctgtggcgtgctgaggtgcgcggcatcggtgcggtcaaggacttcgccacgggctggaaggcacgtgcggacttcgagtacgcagtgaagctgtaccgcgagacccgcttcaacggcggtgacatcccggacgcgcacgaggcagtgaaggcgatggcccgagagatcgaccgtggctacaaccgcatggcggcagagcagcgcgcggccggtacggtgggcgcacagcgtctgccggaagaagacgtggagggctacgagtcccgcacgtggctgggcggcagcatcgctgctgctggtccggttcgccgcgagggtatccgccaggcgatgcgcgagcagttcgaggtgatgggtgagctgtacggggacgagttcctcgacaagttcgctaccaagtacctggagcgtatcgagcgcaaggctgcgggcatcatcgaagcgccgggtcaggtcttctcggagtcgcaggcggacacgctgcgtgacactctgcgggcgatgtcgctcaacgaggaggagatccagaaggtgatgggcaagtacagccgtggcggtgcgaagcacaccaagtcgcgtatcgacctggacgtgaccaagcagtacgaagacgccgatggcaagttccgtctgatggactacctcgacaaccgagtgatggacaactaccgcaagtacgcgggccgggttgctggtgacatcgccctggcgaagcacggcatcctcggcgacgcaggcatcaacgtggcgcgcgaagcaatgcgcctgaccggtgccaccgacgtggagctgaaggcgttcgagcaggtgatgtcggagttcctcggccgccctgtgggcaatggcgatccgaccgttctggcgaatgcgcgactgctaacctcggctatccagctgggcggcgcgggcatcaatcaggcggcggagtacagcaatggcctcgcggccgtgggtgctgctggtgtggctgacgcaatccgtatcgctccccgcatgcgtggcgaaatcatgcgcatcctgaagggcgaggagagtggcaaccagatcctcgacggcttcgagttcatcagcggtcggggcttcggcctcgccggttacgacctgcacatgttcaactcgctggacacgcaggcgtcgatgtacggcagcgagcgcgcaggcttcctcacctcgttggtgcagaaggcagcgcacacgaaccgcatcctctcggggcagcgggctgtgctcgccgtgcagcagcgtggcttcgcggaagtgctgatcgccaagggcgtgaagttccttcgcgacggtgccgaggctgacaccgccctgaaggacatgggcatcgacgacaacctgctgaaccgcctgcgggcgacgcaggacaaggtcgtgcgctggggcgcggacggcaagctggaagcagtggacccgcgcaacgtcgatggactggcggatcggcaggcatggctggcgttctacaacgcgatcaaccgtggcacctcgcagattcttcaggacaccttcatcggcgagacgggaaagtgggcgcacaacggctggctgaagatgctgttccagcaccgcacgttctcgctggtcgcgcagcagaagcagctgggccggtacgtgggcaactacggtgcgtggcagactgcgggcctgatcgctgcggcgatggccgtggctgcgccgctgcaagccctgcgcgtgctgtcccgtgtggccctgatgaacgatcaggagcgcgaggaggccatcgaccagaacatcctgtcgcccctggcgctgggcaaggccacgctgaactacgtgtcggcgacgggcatgctcaacgacgtgctggacgttggcaccggtgtggccggcgggtggtacgaatacgccaccgacacccagggtccgacgtggctgaagcagttggccggcgggcagttcggtaaccgcaaggaggtgatcggcgggcagttcgcgccgtctctaggcgtcatcaacgacttcgcccagggcatcgccggcaagccggagaacctggcggacgtcatccccggcggtcgcctgcccatggtgatcccgctgctgaagggcgcggccagccagtggaaggaggagtgagaatcagggccaaggacggcccacccttttggtacacctacagctaataggaggcagcatggcagttccagacccgcagctgcgctacgcgacagacgtgttcgacgccgatggcgtgaccactgactggcagatcagctttaccggtggctacatcaacccgtcccacgtgtacgccatgagcggactgttggacgaagagacccagctgctgaccgatcggaccccgcacaccgtggaagtcctgagcgaggacgatgacgctagtaccgtccgagtctcgcctgccgtcgccgctgggcgtaagctctacatctaccgcagcactccggtgcagcagatgctcgttgactacgttaacggtagcatcatcagcaagaccaaccttaacctcagcaacgaccagctcctgaagatcatccaggaaatgttcgactcgctcaacatcgccacccttagcatcgaccagcaggtcggcgtgatcgtggacctgaacgagatcatccagaacatctacaagcaggtcaccgagttgctggccgctggcggcatcgtgtctgtcaccccgcgcgtctggtccggttcatggaccggcgaccaggccggcgacaccgacttcgacatggtgggcgcggacgtgtccggcgccggcttctacgacgtgtacgtcaacggcatcggcatgcagccggacgtggactatcaggtcaccctggcggacggtaccgatcccagcttcatccgcttcgccacggttcccgccgaggggagcatctggttcgccgtgcttcgtggttacgccaagccctacaccgggccgccgccgatcaccgctgcgagccttcgggtgccgatcatcccggcagcaggcccgacctactacgccgacaaggctaccgagtacggactcgtgcgctgcacgtatgccggaggctgcaccgtcaacatcaacctgatccccacagtgggcaacggtgagacgaagctcgcccctggcagctacttcagcgtccagcagaaggcgggtccggtggtcatcaccggcgatgcgggtgtgaccctggaagtaccggtcggatgcaccgccgcaactcgcggcaccaactccgtcgtcacggcaacgtgcatcgacggcgacaccaacacgtggttgctttcgggcgacttggctaaggagtaagcatggctaatcacttcaggctgtacggccgaccgctgatggcggacgaggttgtagatggcctgtcggtgacgggcgtgctggaagggtacacggcgggcgaggcttacacgtctcgcctgtccatcaacaacccagtcggccgctgcaccgtggaggtcatcgaatcgacgctccctgcgggcgcggtagtccgagtggacaacatcaccaaggaagtcgtcgtcaagtgggcggctttcactgaagtcctggacgaggaaaccctcgtgcctaacggcgacttcgaggcgggcgacgacggaacgtgggtgcctggcggcgcggagaatggcgagggctggtcgattggcactggctccggctacgacaccgacggcggcgcatacagcgcgcgcttcgccaacatcaagacgagcggcagcgacctgctcaacccgctgattcccgccaaggtcaacgactacatccgctgcaccgccgaagtcaaccagggcgcaagctcctcgggtaaggcaggtgcacgtgtgtcgatcatctaccggagggaggatgggacggagctgcaacgcaactccggcaacctcgtgaagtccggcagcggcggcgcttggcaccagtcggtcgccgagggagccgcacccaaggacacgaagtacgtgcagattatgctgtctgcattccgcagcaagcagaacaagccgctgtgggtggacaacgtcaagtggaaccacaagtacgtgctggggcagaacgacgacagttcctacttcctgagcatcaaggtcaccgacgggttgaaccgcgtggcctactggtccggccgtatcgaggagcagggcatctacgttacgtcgaagctctacagcttctaccagacggagtctttcctcggcaccagtgggttcgccgggtactccaacagggacatgcagactcccttggaacagttcctctgcggctcatccttcgttggctgggaaattcgcagctcgcgtatagaggtggacgccggggcagaatcgttctcctgcaccagctcgctggtcggctgggagattaagagcatccgaaaggagtacgctgtagaaacccccgagtctgttcgtgttcagtcctcgttccattccttcaacctgaagcagcatccggtagtgaaccagccgcccgacgcggccgcacttgtccggtctggcttcgtctcatggagtttcgcatgatccaaaacaagctcggagttgccgggttcttcaccattagcaaaggcaagtcgctcgactcgctgaagacggtggcggactggcaacagaacctcattaccaacagcggcatggatgcactcggcggcaccggctacccgatcagcctctacgaaatgatcagctacctcgcagttggtagcggtagcgcgactccggcgttctccgacaccgcgctgggtgcggaagttgcgcaggtcggttacactacccaaaacaacggcggcactaccaccgcaccgtactatgcgtacgcccggatgcagttccagttcgcggcaggtacggcaaccggcgtgctctccgagctgggtgctaagcgctacaacaacagcaccggcacgtacatcctcaccacccacgcgcttattcgggactcgggtggtagccccaccaccatcaccgtgctcgcagacgagatcctcgtggtcacctacgagcttcgcctttacgtggacaccacaccggtggttaccacccagacgatcaagggcgtaagcaccactgtgacctgcaagcctatcgcgcttagcaccggcgccatccagggagccggcgccgtcgcttggaccaactacgtgtggggttgctactacttcatcggcggcaccggagacggtactggcgcaatcaccgacgccacccctccggggaccaacgtcagctactcggatttgtctacccagcatatcgactatgtgcccggtacttactaccgcgacgtcgtctgtcggctctcgatcaacaacgttccggatggccctatcaccgcagcgatggggatgtcagggtgcatcccgttccaggtcgggttcagtccgggcgtcaccaagaccggatcggaaacggccaacctgcgcatgcgggtttcgtggagccggtacacgccatgatccctactgtctcccaaagcatccaacgtggtgactgggtagagcagcagaatcggcgcacccgcccgctcatcgacttcgagcagggcgggctggtactcaacgcatcagtggataacctccaagctgcgctgtggaccgccgagagtgacggcagcagcgtcgtcgtttaccgcgacggcgttgccccggtcaccgtgctgacagactccggcatcacgcagatcgcactggcattcgaccagaccatgcggccgcacatcgcctacatggcgggtggcgcctgcaagttctactggtacgacacggtggcaggctcgatgcagaccatggtgatccccggcgcaaccacgccgcgcctgtgcctggacgagaagcgagcgatgttctccactcagagcgacgtgctactgtcgtacaagaacgggagcaacctgtgcgtccgcgcgcagcgagagcgcttcgcaaccgaacacgtgatcgccaccggaatccccggtgagctagtcgcggttggcatgaacaacgtcaaccgcctgcaatggaaactcgtcggcaaccccgacgactggccctaaacctacaggagaacagcatgaccccgccgagtgtggtcaatgaggtcgtccgaacctcgccgcttacgctcggcgcggtctacctcaacttcatcagcacgtatggtgctgccatcgtaactacgctcgccatcatgtacgctgtcgctcagttctactggcgcgcgcgcgagcaccgcaagatcatgggagggaatgatgtcgaacccagcaagtgagggcgcgctcggcgcactccacgaactcgttgccgtggtactgaaggagcgcctcgccaacggcgagctgtgcaccgcagcggacatcaatgccgcgatcaagttcctgaaggacaacaacatcacggctacgcgcgaggccaacaaggcgctcggcgaactggaagacgaactcggcaagcactcgctgccgcaggcggacgatgacgagttgcagagagcactcagcaacatcgtcaagtttccggggagcgtagccaatgcgtgaatcagccgaagcggcagacatccgtcgccgcaagttggagctgttgcagaaccactaccggcacttcgccaccttcatgcgagacatcatgaaggtgctggggttcgatccgacgtggatgcagtacgacatcgccaactacatgcagtacggcccgcacctcgcaatggtgcaggcacagcgaggcgaggcgaagtctaccatcgccgcgatctacgccgtcttctgcttgatccacgatcccacccaccgcgtgctgatcgtatcggcaggcggtacccaggcatccgagatcgctacgctgatccagcgtatcatcctcacggtgcccacgttggagtgcatccgaccggacaagaactccggcgaccgcaccagcgttgacgcattcgacgtgcaccactcgctgaagggcatcgacaagtccccgagcgtggcgtgtatcggcgtcaccggcaacctgccgggtaagcgagcggacctgctgatcgccgacgacgtggagtccaacaagaacagccgcaccgcagccaaccgcgagctgctgctgaccatcacgttggagttctccgctatctgcaccggcaagcccggcactccggggcgcatcctgtacctcggcacgccgcagaccggcgactccatctacaacaccctgcctgggcgcggctacgacgtgcgcatctggcccggccgctacccgaccccggcgcagcgcgagcactacggcccgcatctggcgccggctatcgtgcagcgcctggaggccgaccccatgttggcgttcggcggcgggccgatgggcgacgaggggcagtgcaccgacgagctgttggccggagagcagaagcaccagtccgaactgcggcagcgtggaccgtccagctaccagttgaactacatgctcaacacgcggctcatggatgcgcttcgcttcccgctgaagaccgagaacctcgtggtcatccccggcggtggcgaccgctacccgctgacgatcacgcgcggcctgagcaatgctcaccagcgcgcgttccagtccagcggctacggcttcgtcatgatgatgcctcacgagatgagcaccgagactgcgcccttgcagggcgtgcacatgcagatcgacccggcgggtggtggtgccaacggagacgaaacggcgttcgccgtgaccgccttcctgaactccaccgtgtacgtcctggccgtgggcgctgtgcccggcggctatgacggtgacggcctgctcgaactccgccgcatcgcggtgaagtacaagccgaacgtcatcaacatcgaaaagaacatgggctacggtgcgttcgccaaggtgttcctgcccgtgctgcgagaagaccgcggtaccgagacgggatacaagggcgacatccgcgaggagttcgtgaccggcaacaaggaagcccgcatcatcggcacgctcgaacctgtcatggctcgtggctcgctggtcatgctggaatccgtggttgagatggatcacgagtacacccagcgctacgcatccagcggcaagcgccaggtctacagcctgttccaccagatggcgaagatcacacagcagaagggcagcatcgcacacgatgaccgcctcgacgcactggaaggcagtgtgcgccactgggttgcgcagcttgcactggaccagaacaaggccatcgtcaagcagcagcagcgagagttccaagactggatcaacgatccgaccggcatgaaggcagcgacccgaaagagtccgctccaacgtggccgtccatccctactcgaccgctaccggaggtaatgtggcgaacaagcttatcaacatggcagtacggaccagcacttacggtgctgagctactcactgccgaaaactccgccgccgcacgagtgctcctcggtgttaccggcggaggtggcggcggcgaggtagcctctgtcaacgggcaagttggtgctgtggtactggactacgcggatgttggagcagcctctgctgcccaaggcgcgaaggccgacacagctttgcagccgggtgacgcagttggcgcgatcagtagcgtcaatggcaagaccggcactgtggtgctcaccgccacagacgtgggtgcggccaccgccgcccagggtgccaaggcggacactgccctacagcccggagacatcccagctcagtccgtaaccagcgtcaacggaaagaccggtgcggtcaacctcgtcccggccgacctgggtgccgctactgctacgcagggctcgaaggcagacagcgccgtgcagcctggacagctcgcaacggttgctacatccggcagctacaacagcctgacgaacttgcccaccttgggaactgccgcttcgcaaagcgcggcagctttcgcgagtgctgctcaaggtgctgctgctgacgcggcacttcccgcagcactggttcccaccggacttgtcgttgggttgtccttgaagtacgcgagcgcgactacggttacggtcacagcggggtcggcttacatcccgggaacagggttggtgtctctcgcatccgactccaccatctctcccggactggcagccagtgtgtggcgacatgtctaccttactccttccgggtcggtcgaggcgtctgctacagcaccggctgcgccgtatgctggtaccgctcgtactaagtctggcgacaccacccggagatacctgggtagcatcaagaccgacagctcgggcaacatcgtaaagttcttgcacaacgccgcaaccggtgcggtgaagtacctttacgacatcaacacggcgcccttgtatgtcctgtctgccggggtggcaacgagtaacaccgttgtctcttgcgcagcagccgtccctctaacctcccgcgtaatgtatgcattcgcagaaaacgtggcagcctcgggtgctttcgcctacatagctaacccggatgcggggcctgctggtccgaccatgatcttggagtttctgcgcgccaacttcatcatgttcggagagctggtgctagactcttcccagcaattcaactactcgcgtaacactgctgacaccggcggcctctccgtctggtgcacaggctacacatacgaacgataaggagcaaccatgctgaagtccgacttcaccagcaactacaccggcctgtacggccgcggcaactacctgcaccgcgaactgctcgccctcgtggagcacgcggagaagcaccccgcaaccgccgggcagctgctcgcccagttccagaaggactcgacccaggtgctcaacgccctgatcgcggccggtgcgcgcacgcagtcctcgggcccgaactccggcccgcacaccccggtcgatctggacccggacgacaatccgctggacccataggagcaaccatgaaccagcagcagagcaacaaggggctgttcggcctcgtcggtggcatcttcatcggcatctcggcaacgctgctgtcattcacccagggccacgaaggggtacgctacaaggcgtacctcgacaccggccgggtgccgaccatctgctacggccatacggacggcgtagtgatgggcatgacggcaacggagcaacagtgcgacaagtggctgatcgaggatcttcagatcgcccagaagggagtgcgcaagcacctgaaggttcccgttaaccgcaaccagatcgacgcctacacggacttcgtgttcaacgtgggcgagccagcgttcgcgaacagcaccatgctccgcaaggcgaacgcaggggaccgcgaaggtagctgcaaggagttcctccgctgggtctacgtcggtaagctcaactgccgactgtccagtagccggtgctccggcatccctaagcgacgcgacgcagagttcgccctctgcatgcgccccaacaacgaggtgatccaaccatggaaaccccaagccaagtaatcgcgcggcttagcggtaaggctatcggcctgctgctggtcgtgaccctgttcgtgtgctccggtctgtacgtctacggcctgcaacgcaaggtggagaagctggaaactgcccaagtcggcacgaccgctaccgccaaggcggctcagacccaggccaccgggtacgcaacctacatcaaagagaaggaggacgtgcgtgtacgcactgaagaagctctcgacgccgttcccgagtaccgtgacggcactgttcctgctgatgtcgctgacctcctgcgcgaacctgccggttcccagtgatgatctcctgaaggactgccatatcacctacctcggtggtgagcgtggctcctcttccagccaggacaaggtggtaaagctggcacaagaccgccggatggacaccgttctgtgcaacaaggacaaggctgcgctgcgtgcgtggaaggccgaggtgtgtggcgtcggcaagcgccggtgtgtgcaggacaagtgacatgacgactatcgcatgggacgggacctacgtctacagcgacagccaagtgacctacggtagtgctaagggcaaggcggttaagatattccgccttgtctctcccgatggtccagttgttgctgcgttctgcggtgagcggaacatcatccacgactgcaaactagcaatcgaagcaggccgcagtctagacaagctcgtcggtaaggagtcatccgtgctggttgtcggtaaggacgcagcgttcctgacctctgagggtaagacctggagggtggatgcgcctctcttcatgggcagcggcatggacttcgccgaaggagcctacgaaatctgcaaggatgcccgcaaggcggtcgaggttgcgtgtcgtaaggacttgtacagtagcggaccgatcgctagggtcaaggctccgaagtaagccggaccaaaatttgcttcggaaatgcgcgggggtcactccaataagagctcccgcgcgtgcccccgtacgccctcgcgttacgcgcctgggtgtgcgtgtgggcgtgtgcctgcgtgctcgtgcctgggcacgggtgcctgcgcctgcggcgcgtgtgcgcgcctgtgcgcctcacctgcgggcgcgagacgatgcacgtgggtgtgtgcctgtgtgtgcctgcgcggggcgtgtgcgcgtgcctgggcggccgtgtgtgggtgtgtgcgtgtgtgggcgcgtgggtgtgcctgggcgggtgcgcgtgtgtgggcgcctgcctgccttggctgaatggttaacaattctctcgccgtgaggtgttgacgtggccgcctgggtgtggtccaatggcctcactgggcgccgggaagggccgcaggagggccgcaaggggctggacaggtacacacctaccgggtaccatgcgaaccgctgctgtaggcgtgtgtgggccatctgtatcgtttcgcctcgtttcgacttggtgtgatcgacggttcggccttttggtacacctacagctgagaggtccgatgccaagctgaacgccgacgtatcggtaccctgtcgggatcacagtaagctactgctaggctaaggttgacgcttgctgacgcaagcagtagacacagccatgcaatgtaggtaagctgaccgggagttgagtgaccaagctattgagtaagatggtgggaagccctcgggccgacgacaagagcaaccatcctatagctatctgagtgtgatgcgatgagctaacacgatgacacttgacagtaagcccacagtgagctatgatgcgggccaggtggtagagccaacggtaaggcggctggatcaccagtaaggagcggaccaccggctatgatgaggtgggatggtggcgacaggacgcccagcgggttagagacccggcagtcaagataggcaaccatgccgaggcttgacaagacagcaccacggtgctagtatgtgagtcacctagtgagcttgtcaggtgtgtctgcccgaacatctatcggaaacggcagtgaaagctatccgagcacttgacaaggtcacccaggtgtgcaacactggcaacacgctccgaggagcaccggcactggaccggagtaagactaccgctaacgggtagggtgtaacgtgaagcccttatgggtggaacgccaagctgcaacgtagcactagcggataaccggatgaactagggcttcaaaatcctactgaatccaccagttagctttcttgcgaaagcaagaggactagcaacactggtgccgctttacctagagctaacgtctagggcctgcatctgccgtgagagtcggccacgcaggtaacctactgccaaggtaggaagccggtcataagcgggtggtgagcctgctatcgaggggaatacccttcgtttcgtgaaaggttctgcatcgcccacggtgacaatggcactgctagccggagtagggttgacagcccgaagggctagcagattgatgcgctcta

SEQ ID NO: 15 - DNA, 44388 bp, unidentified
  misc_feature 1..44388: note = the genomic sequence of a bacteriophage
  source 1..44388: mol_type = unassigned DNA
cctaggcggggtttgttttgcgccacgtccagagtgtcttgccgctatcccacacccgcaaggcccctaccgcgtcctcgatgtcccactcggtgcgcgagtcgttagcggggtcgaacgctgcagaactgccgatctgcaacagccgcgttggtatgtgcttgcgtgcccaggccgacttcggacgaaacccaagcttccggtgatacacccggtaatccggctcgacttcctttgtcgcggtgaacccgagcgcctcatacacgccgcctgcgaaccagtcgtgagcgctgtagctgacgacgctctgtgcgcaaagaacggcgacggcatgcttaaacagcttagacgcacctccacgtacttgtgcactcgtcgcgaaccgcgtcaagtcccacacgcccgacttggtgcggttgcgcgaataggcatccaagttaaacgtcatcaccgccaccaggccgtgcaccgggtgctgcagcccgaatcggcgcgtgtagacccgccccggctgctgcggatggtaggcgtctaggaacgcgattgtttcggcagtcgtaggctccacaatggcgcactggcgcgcgtgcagcttggcatcttgcgagcagcccaacgcgttccggatcaatcgttcaaactgcggacggcgttccttccattcggcgcaggtaacagccagcaaccgatagcccgcggccgcgacagccgtccgtttatcgcgccccgccgtttttgagctgcgccggtcggagtgccagtacaccccgttcagttcaatagcgatgcgcgccgagggcacaacgatgtcgagttccttcggcgcaatcagtttccggtcagaaccgtaggcgtctgatttaagtgattgcacgaatgccagcaaatcacgttcggatggtgacgggccaaacttaccgcagcgcgggcagccgtggccgatcaagtgattgtttgcaatttgctgaaacggcccgtgctcgcgacagtgaattgtcactcgctcggtcgaacgcgagtagtcatcgatcgaatagtcgtagcggtcgccatgcactgcgcgcgccctcgcggcaaagtcggcctgcgtgaagaaccccggtgccgaagtttcacgtccgcacgccgggcagcccgaacccgcaacatgtgcgcccgctttctgcgtgaagcccccgtgcttggggcaaatgatcgacaccgtgcccagtgcgtgcgtgtacagcgtctgcgcatagtcgtagcgagcgccgtgcactgcgcgtgctctggcgatgaagtcctccgccgcggccgtgcgccgtgcgaggccacgctcggcagccgcgcacgccgggcagccctgaccgccgtttgcgtggtgtgccggcgtttgccggaacgggccgtgcgtgcgacaaactatcgatacaggatcgtcggcccgaacgtactcgacggccgaatagtcgtagcggtcgccgtggaccactcgagctttttcgatgaacgcgccgaggccttttcgctgcgtcaaactgcgagcccgaaggccgcagtcggggcagccttgcccagcgcgatgtttgtccggcgtctgcatgaatgcgccatgttcgcggcacacaatgcgcaccggcgttcgcgcatcgatgacctctgcggggtagtcgtagcgggtgccgtgagtgtgccggaaacgcaccaaccatccgtcgtgtgggatcttgcgagacatacttactccagatacgtgaggtgaactttaatcgcacccgacacgcaatgcaagcgccgtattcgtgtatcatcgcacgcgtaaaccacacctacaggaacaattgcaatggctcgcaaccgcaacgacagcaaccaaccgtccgacagcgccggcaccgtcaccatcgcgtgccgcctgcctgcgggcatgcgcttcgagaatgttcccggcatgccgggcggtgtgctgatgatccgcggcagcaacgacgactgggcgctcaagatgatcgaagagtacgaagcgcacggcctgaccagtggcgtaccggccgaagcgtgggactacatcgccaaccacccgtactacagcaaggccaagtggtacaccagtggcgccgtgtttgcgaccaccaaggccaaggatgcgatcaaggaaacccaagagcgcggccagaccaagaccggcttcgaagcgctggaccccgaagaactgccgggcaagatcgaagacgccgtcaaggccgaagccaagcgtaattgaccggagtagcgcatcatggccgtcgttgtctttgaccccgcagcattcaaagccgcgttcccagagttcgcgacggtccctgatgcgcgcttgaatatcctgttcctctctgcgaccggcgtcatcgacaacaccgatgcatcggtcatcgcggatgtggcgcgtcgctccgcgattttgtcgctggtcgtggcgcacctgctcgcgcagttcggtacgactgtcgtcggcaccggcggggcgaacccgtccggggtcgtcggtcggttgtccagcgcgaccgagggctcggtgtcctcgtccttcgagttcaacattccggcgtctgctggcgcggcgtggtggaaccagacccagtacggcgcaatggcttggatgttgctcgccccgtttcggtcgttccgttacgtggcgatcggccattccggcgagggctatgcccacgcgttcgccgatcggcgcctgtaccccgagggcgcgcagttgctgtccgaaaacagcgggacgcccaacggcgtatgaccaccgtccggcgctcgggtgtcaaactcccttcgcacatgcgcgagcagttcgtgcccgcgagcgtcaaggcaggcgtgctcgagggcgcgacatacccacaggatacatacaccgatcaccgtaccggccagcaagtcgccgatgcccgcggcgggatgcccgttgcggcaatcgctcaggcgctcgaatacggtcatgggcagaaccatccgcgcccgttcgtgcagtcgacattcgccgcgcagaatctcgcctggtcgcgtggtttgacccagttgatcaaggcgggcgcggcgaccgacacggccctgcgcacgattggactacgcatggccgaagacctacagcagacgatccgcgactggcctgcggacaactccgaggattgggcggcggtcaagggcttctcacatggcttgatttttacgggacatctgaccaattctattgactcggctgttgtgctgcgcgacggcgactacggcgaggatccaagcccgtgagcggcctgaacctacacgcgatcgtgcgtggcgctatccagacggtcaatcccgatgtaccgggtgacgtctacatatcgactggcgccacgacggccggcggcatccgtacaccgacgttcggcatgctgccggcccaacgcctgcaagtgcaggcgatgtcgcatgaggatctgtaccacctcggcgggttggccttcgcaggcaacatgcagaagctctacgcgtacgggcagtttgccggcatcgtgcgtcccgacggtaagggcggcgacgtggtgcgactcggcaccgaatggtgggttgtccagcacgtgctcgagtggtggcccggctggtgcagcgtatcgatcacccggcaggtcaacgccgcgacgttggacgcgctgacgaaggcgttagccaacggcgcggtgccgaccttgggggtgtcctgatggccgccgcgctacttaccccgaacgaagaccagaccttcgcggcgctgttcgacttcatttccaaggtgctgggcctcccctacgacaccgaccagatcgtcaaggggtttcagaaccttgtcgcgacgccgaccggtagctatgtggtcgtgtccccggggatcatgcagcgtcaggattttggacgccgcggctacgatccggacggcaacgcgacgatcgtcggtgcgcaccagacttacagctatcaggtggactgttacggccccgaaggtccgacctgggcgtcagtgctgcacgctgcgtggcgcacgatgtgggccgtggacaacatgccgtctggggtgctgatgcccctgcactcggacgcaccacagcagcttaacgttgtcaacagcgaaggccagttcgaacagcgtttcatgatccggctgttcggccaggtcaaccagcaagtcacgctgccgcaagactttttcgacgtggcgactttggattccatcattgtcgccgatcaactatgattggcatatccgaccggagagcgtgacccgtggcaaatatccctatttcgcaaatcgtaaccgtcaacccggcggtcgtcagcgcgggcgggccgcagacctcgctcgacggtctgttcctgacgcagtctacggccgtggcgccgggccagctgcagccattctacagcgccgccgccgtgactggcttcttcggtgcaggctccgacgagtccactgccgcgcaggtctacttcgccggcgttctcaatggcggccagttgccggcgactctgacgttcgcgcgctacgctcaggccgcgacctcggcccaggttatcggcgcaccgaccggcctgaccctggcgcagctgcaggcgctatccggtacgctgattgtcacgaccgacacccaacgcacctcgagcgcaatcaaccttgcggccgccacgtcgtttgccgatgctgccgcgcgcatgacggccggtttcaccacgccgaacttcgcgatcacttacgacaacgcgcgcgaccggttcgttttgtcgaccaccgcgaccggtactgcagcgaccacgtcggcgatcaccggcacgcttgcctccgccgtcggactatccgctgcggcgggtgcatttctgcaagccaccggtctgcccgccgatacggccggcaccgcgatggaccgcgcgaccgtgctatcgaccaactgggcgatcttctcgaccatttgggcagcgacgctagccgagcgcaccgcactggcggcgtggaacagcgccaacgggcagaaccagttcatctacgtgggctgggacaccgaagcggcgagcatcgtccccaacaacgcgtccagcttcggcggcgtggtgttcaacactccgtatacgggcaccgtgccgctgtacggcggcctggtgcacgcagcaggtgtgatggcgtgggcgggcgcgacgacctacgacgtggtcgacggacgcaacgcgctagcgttccgtcagctcggcgcaggcgcgacgccgtcggtcaccaacttggtggccaccgcgaacgcgctgctgaccaacggctatacctactacggtagctacgccaacagcgccaacaactacagcatctactacaacggcgccctgtccggcgcgttcgactggtccgacacctatctcggccagatctggctgcgccgtacgctgcagcaggcgctgttcgaaaccctgttggcgtacaactcgctgccctacaacgcggatggttacaacgcgatctaccagggcgcacaggccacgatcctgcaggcgaccgccgccggcatcatccgcgaaggcgtgacactgtcgccgtcccagcgcgcgcaggtcaaccagcaggcgcgcctgcagatcgacgaccagttgtcgacggtcggctggtacctgcaggtcagcgacccgctgaacgccagtgtgcgcaccgaacgtggctctccggtcgtcaaattctggtactgcgatggtggcagcatccagaaaatcgacatctcttccaccaccgttctctaagaggcgtcgtcatggctgctaccctcaccgttgcaaattcctcgatcgcgatcaccgtcgagtcgttgtacccctcgtcggtgctgctgtcgggctacgccgcggacaacgtgttcgagacctcggcggtcgtgaacaaagagacctcgatgggcatcgacggcaagttctcggccggcttcgtctacaacgagatcccgttcactctcaccctgcaagccgacagtccgtcgctcatcatcttcgagcagatctggcagtacgagcagaccaaccgcaccggcctcgatgtcggcatgaccgtgacgctgccgtccaacggcaagcgctacggcttgcagaatggctacatgacgtccttccgggcgccgagtggccagcgcatcctgcagccggccgcgatcgagttccgcttcggtcggatgacgtttgcgcgcacctgattctcggtgcggtaaggcaagaaacaacaaagcccgctttcgcgggctttgttgcgactgggctctcccggtcagtcacgtgctggctgcgccttgcggcgctgcgacaacacgtttattcgacgtgtcatcaaatccgggccagcccggcgaggtgcttgtagcgctatcctgtagcgctatcccgatgagcaatgcgcggacgcatcttacaccacagcgcacgtgctggggaactgcgaggacgttacttgccgaacagttccaggcaggcgcgcagcaactggcgctgttccggctgcagcttctgcatcggcacgccagcgatgccgactgcggccttgatcgcgtcgatcgtcgcgacgctatgggccgagatgaaatcgcgtgcgatactcaacagcggcagcaacgcggcgtcggtcgccggtgcagcgtcagtcgccgcggcgatcagcagcccgagcgcttcgtcgtccagaccgggcacagccggcgatgcggcatcgggttcgtcgaccggcagcgtgtgcgtctcggtcgtttccggaacttcgggttctgcaccaggctcgttagcctttgcgttgtcggcttcgatctgcgccttggtacggcgcgggcgcttgggtttctcctcgaccggcgcctccggcgggtcgatatcggacggcaggccatcgccgtcgccaggctccaggatgcggtcttcgtcgggcacgtcgacacgctcgatcttcaagtcattgatgacgactcgcggaccgacctgcaaaaacgcggggttgagaatagcgacgaactccgcgagctcatcgatcgacttgaagttcagctccatgggttactccgtggttgtgggtttgcggcgcggtcgacgcagtgatcgggtggtgtattcggtgaccagctggccgcggtacttcgcctcgtcgcgccgtacctcgtcctgcagcacctgcatgcgctcgcggctggtgacacgccggtagcgcatggtgcgcacctgctcctcggaaatgccgagcaggcgcgcggtgttagcgtgcatgccgatcgcatcggtcagctcgcgcagggtccaagcttcgatcggcttggtgaaatagtcggacgggtcacacgttgtttcgggggcagccatttggtcagtctcgttgcggtttgcgataagttacgcgctggtgcgctaatagtcaacccgccgtagtgttgcggtggtagccgccgtccggcaagtgtcgatggcggaacgtctcgaagttgattagtttgtttgccgcgacatatgcagcacctgcacatcgtcgcgagtcaccctcgcgaagcgattcgtaccagatgtcaaacttacggccacttcgagcgtcgagggccgccccaagttgccaagcgatgtataacgcgcttacatcgtgatgacgccaggcccacggggctagatcgaccggcacgtaccgatcgttcgcgatgtcgagcaacaagtcggcggggtacacgtacaccaggccgtagcgcaccacgaacaccggagtgtcgggatgcaacgaagcgagcggtgcatcgaggggtttgcagagcatcacggctcctccgggtaagtgcagatcatctggttggcttccatcgcgcaccgcgtctggcgctccagcacgtggcgctgcaacggcaaatcaaagtccatgacgtactcgcggaacagcgagtcgtcggcgttgtagacctctacgcgtaccattagcatgtggatgtctccgtggttgtggtgaatcaaacgtaacgcacaagttacggcttgtcaatcctttcgccaccgatccgaaacgaatcccgcagcgtccagcggcaggcccggcgcccaccgcggcgcgacgcgcagccgcgcgagcaactggcccaagcgcacctcggcccggtcgcgcggcacttcgaggatcacttcgtcgtagacgtggtggacgatcttctcagccggcgcgatgtcgagcatcgcctgccagaacagatcgcgcgctaggccctggaccatgttgttcgacaggatcttgcggtctagcgtctcgacgaagccttcgggcttgtcgtagacggcgagcggtgcagaagcgcccggttccagcacgagacgcgcattgtggtagctgatcgcgcgacccgagggcaggatcatgcgcaacgccgcggagtccttgacgaacgtcacctccgagcacatgccgcgcccgatcggcatgcggacctgtcggccgggttgatctagtgcgatcagcaccgcgtactcgagggcggcccaccagatggccatcttggagtggttctcgcggtacttccagacgagtttcttacgcaggtcgtcttccaggtacttgccgtagttgcgcgccatgttgtcgagcgcaccgtcgccgccaccgtactgcagcgacaggcgaacgaccttgccgatctggcgctgatccttatccacgttttcgacaggcacttcgaacacgccgctcgcttcgaccacgtagccgtcgatgccctcctcgaactcgactagcatctcctcgtcatctgcgcaccacggtcccaagcgcgcctcgatgcccgcaaggtcggcgcacaccaacgtgtgctcggggtaggtcgcgcagaacagcgggcgctgcgcgtccgccatagcggctagcggcggcccgacctccggctgcgacaggaaatcgaagtcgtcacgcgttgcggcggcgagatacgcttcgcacgcttcggctttgcggcccgggcggggccgcgccacgttgagaagctgagcgtcaccgcagcccatcgccgtagatcggccggacagtgcgccgtggtagaccgtgctgtgcatcatgcggccatcgacgtgcgcgcgcaggatcgcgcccgacttcttcggtgcccggctcgcgtccagacgcagcgcgagcacgtcgcgcagcgccggcggcagcgtgtcgcggctcaacagccccttgaccgtctcgcgcccggcgtcgtccatgtcctcgcccagcgtcgacgcgaacgcgcggatcttttgcacctcgctggccgatagcagcttaccgtcagtggcggcggtcaactcgtagtcgatcagcgcctcggccaactcgcgcatacgctccataccctcggcgccggccacgtcgcagccgaagccgcggtcgttgacctcgtagtcgagttgccagaattgctgctcgaggtcgggcattggcaccgtcgcctcccacagcgcgaccatcgcgttcgtgtcggtcaacgcgtacttgtaggtatgccgaaagtgctccggatgcgtgacgggcgtccactccgggtgcaccatcaactctttcatccacttggccccctcggtgtctttctgcaccgctaggccgagggctgcgcacgcacgctccagcgagcccggcaagccgttgtatcgggcgcgcgccgcactgcactgcacctggcgcacgtccagcatcggcacttcctggccagacgcacggagagctcgtgcgtgcggcccgttccacatgcccagatcgaacccggcgttatgcgcgacgaagcgcttacgcgcttcgatgtgctggttgacttggcgtggcacgggcttaccgtactcccacaggtcggcggtgcgcatgccgggcagaacgaacgtgaagcagtacgcacgggtcgacggatcgcgtaggtagcgtgccaagccgtggcgcttcaagtcgcacagcgatgcagcctcgaagtcgaggaacagagtgtcggtgttaggggtcatgtgggcttctcgttgtgtgggtagcgcagatgttacatcactgcgcggatgaattgcgccgcgacttcgggaacgattgcattgccgtaaccacgcagcgctgccacgcgggtgggtaccccatgagccagcgggaatgatccgggttcaactggcctgcgctttccatccctgcatccgagccaatcagcacctgtccagaagccgtgtagcggatcggttgcgctagccaagccactcttcccaacagcgcattcgtgggtacgttgtcgcatcgggacccgtccttccaatctcgtgctgttgcggctggccagcccgccagacacgcagccgctgccaagtccggcccgtgattgcgcatcgcttcctgcaacccgccctcgaatgtccgcacgcccttgtcggccagcgccgccgttggcgtgggccacccagtagagtcgctggcggatgtgcggcgcgccgacgcccgcagcgcacagatcggccgccccaacggcgtaggccgcaccttccaggtcagcgcatacaaggtcgagccagttgaggccgtcgaggcttgcaacctgctcgccaaaaacgcttggagggcggcactgttcaatgagccagtggaatgcgggccagaggtgccgctcgtcagcaaacccagctcctttgcctgccgcgctgaaaggctggcaagggcagctgccagtccagactcttcggtctgcgggccacccggcgagctggagggcgagtggccatccgccgatgccggcgaagaagtggcattgtgtgtatccgcgtaggtcatttggggttacgtcctcgatactgcgggtgtcaatctcgcacggtgggatcaatccttcgtctcgcaactcggctaaccacgctgcggctttcaggtcgtattcgttgaggtagttcatgtgggccctaaatcctatttgtaagccggatcatattggaaagtcgccatttgtccgtcacgcacaaatcgtacgtgagtgagccaaacaagtccatcctcgaacttggtgaacgtgatctccgtcggttgcgggatcaggtcgcgctgcagcaacacgcggtgcggctccttcggcagatcacggcccgtcgatacctcgaagtatttccgggcctgggcgaagaagcggttatcggcggtgcgccggtcgaagtccagacgcagctggtaggtgccaaccgccgtctcgtagtggaatgtgaggatgctttcgccctcaggcaccgagtaggaatggtccaccggaacactgcgggtctccacgcacagctcgtcgcgcaggatgatcgaatcctcgtcgtgcaggtcgtagctgtctccgatgccggagtgcgggtcttgcggttcgggcttgcgcgactgggtgacgaacccctggcgcggacggttgcagtttcggcacgtcatgtgctcggggtcgtttaggtagccgcacccaggctcgtcggagtccatcagccccagcacgacgcgcaagtcgcgttcctcgatgtcggggctgggtgtcgggaaacggatgccgctgcgctcgcgctggaccgcaatccctggtgcatccacgcgctcggcgctgcactcccacaagccggcccgtgagtcaccctgttcgagatccgcattgatcgggccgagccggtcgaagttgccgccggcgtccagcaccaagcagttctctttgccggcatacgggcgaaagccgcgcccgacgatctgacggaacaacacctgcgagcgggtggcgcggacgatcacgatcgcgtcgacgaacggggcattaaacccggtcgtcagcgtgcccaccgacacgatgtgccgcgtttccttggccaggtattcgcggataccctcgacacgttcgcccttgtcgagatcgccgtaaatcagcgtcaccgtctcgccggcagccaggagcgcggcgcgcatcatgcgcgcatgttcgacgttgacgccgaaccacatcacgtggtcgcggccgaccaagttttccagaccgacggcaatcacctcggcggtgactttcatcgcagcagcagccagctgcttctcgtcgaaatcctcgcccgaggtcttgacccccgcgacgtcgatctgcgggaagcgcaccgtcggtgcgacgatcggtgcgatgtagccctcgcgcaccaagcgattgaacagccgcccggtcgtcaggtcgtataccttggcattgaacaatccgcactgcgacagcggcaccgtcttcacgcctttctgacggaacggcgttgcggtcagcgcaatgaaccgaacgtgcgggttttgctcgcgcgcaccttcgaccagtttgcgaatcgacggcaacgacaggtcgaagccgtgcgcctcgtcgacaatgatgtagtcgatcggcccgaaccggcggatctgacgccacaccgactgttgcgtgccgaacgtgatcttgcgctgacgatccttacggttgagcgcggcgcagtatacgccgatgcccgacacgagggttgcagacaggtatgacgacgcttcgtcgcggttctgcccgaccagctcttgcgacggggccaggatcatcacacgcgcgctgggctgggtggctatcagtttttcagccagcatcgcggcgaccagcgacttgccgccgccggtgacgatcgccgcgatggggtgcacgttacgcgcagcttgcagagcggcgacaacagcattcgccgcctcgtcctggtaccaacggggcgtctttcttgtctgtgagggcatgggcgtggggtctaaggttaaacgaacatgacccggatgttaccgggtcatatggagtcagtcaataacacggggtggccggcgtcgcgtaggcgcgaatgcgacgcacccaatacgcatgaccttgcggtgtcggtcgccacacaaacgcgtggcgcaagctgtcgcacgccaaccctcttggcgatatccatcacagggccgccttgcagtcgcggatcagctgttcgagccaagctgcgcgagccgccatcgacgcattcgcccgaaagccctttcggcgctgccactggcccaaaaacatagcagggccacccagcgcgcggccgattagattgcaacaatcgttccgtgcatgggaaaaacgcgccccgtagcgcacttcactcgccgcaccaagggcgctacaaataccggccccgcggcgaatagcggcgggtaggtatacttttgcgtcctcgaaaagttggatcatcgcccggatgcgggctttctgctcgtcggtatactgaatgtccatggtggtatgtcctgtgggctgtggtgattaacgcttgactttcttcatgtagccggtgcgcgggcaggcttgccgctcggcatagatcggcttgatcacccgggcaagcgcgccgggattgaacgcgcgccaagggtgactagacttcggcttggtggcggtcatttgactgccccgagtcgatcgatacagtccgccgtagcggcacgcttgttgtcgcgatcgacgatcgcgtaagccgcctgggtgtaggcgccgacccagtcggataggtcagtcgacacgggcggcggatccagcgcaatcgcggcggtccgctgttcgcacagcacacgcgcttgcgcggcttgcttcccaggcacggagcgcgacgtcgcgcatccgctggaaacgctcagcgtcagtagtagcaggatcagtcttaacatgggcgatttcctgttgggcattggtcagttgggtccgggtgtcggtggtctcggcgtcgacgcgcatgcgaatgtcgtagccgatggtgatcgcctcggcctggtaggccaccgcttctttggtgacctgcaggtcggcttcggtggtcgcgtcccgtgcccccttggcgtacagccagtacaggccgcccaggaccgcggctacgaggacggtgtagatgatggcgcggattgggatagggctcatagcttcgggtccaaataacgaaaggcgagcaaacctgcgtcgacgatgccccttggcggcaaagtcttggcgaaatccagtatccgccgcagggcttcgagggtctggaatggcaaaactatcgctgcccggtcgtcgtggatatggtcgctcatggtcgatccagtattttcgccaacatgcggtctgtacacccacgacactcgaactcgccatcggtgcgaagtctaaacccggctctgcgcgcatcttctgtcatgccacgcaccgggatgcgccctgcgcgcacgaattcaccgggcccggcccgggcgcactcgtgacacaccggctctacccagaacttagcggcgctcatcgcgcacccgccattccgtaagcgccgcacagtcggcccatcgtgtagtccgcattcgtccccgcgctagcgggcaaccagtcggcctcgacgtccaccgcttcgccgaaccgttctacctgcaccagcaggaagcgccaattctggcaatcgaacacgtaccggccgggcgcccactcacccaacgcattctggtgccgggtccaggcgaggatctgactgtcggcctggcgaatcgtcgaggcttgcacctgcacgccttggccgatcgcatgccaacccaacgggctgacggtctgtgcgtttgcgcccgaaccgagcaacagcgcggccagtgccgcgtaccaacgggacttgagtttcatcaggacaccatgtcgaggatgcgggcgacggtgcgcagagcgatcgtcacgaggattgtaatcgttaggccggtcgccagcatcgcaccgaccagtcggcccgggtgcgggtggcgccgacgggcctgcgggccgcgtggtgcgcggacgccgtacggattggggatcgaggtgttcatggcttatccttgatttcgattagggtgtctagccaattaggtgcacacagtgaagccctaaacggcgaccacgctttgcctcgcacgctcagccagatactggaaccagacacaggtcgcgactcgaatagataccagcgaccatctgcgtcttgtgcagcccactgcgcccaatccggcacatcgacgggcttaccatcgagaaccagaatcccgggcgccacctccacacacgctacgcactcccccgccaacgcagcatatgctgctaggtcgacgtagtcgtcgagcttgccggccgacgtggcgaacgcccgggcttgtttcagtacggtcatgaacagccagccgtcgcgctcggttagggcatacccagacagcgcgttgaacgcggcgacggtgcgcgccatcgagcgttcgccgcccggctggtcgcgctctgcggcgcggtcgtcgatggtctgcgcggactggcgcaggatgtcggaagcggtaggcatggctcaagcctccagcttcgacaggctggaaaacaacgcagctcgttcttcgatccacgccgccgcctccgccgccgcccgcgccgactgcgccgccgccgactgtgccgaccgcgcagccgaccacgcctccgccgtcaccgattccgccgccgattccgccgccgactccgtcgtcgactccgccgccgactgtgccgactccgccgccgaccaggccgaccgtgccgccgaccaggccgaccacgcagccgaccaggccgactccgccgccgagcgcgccgagcgcgccgccgagcgcgccgactgcgccgccgactccgtcgccgaccacgctgccgactccgccgccgactgcgccgactgcgccatcgccgactgcgccgaccgcgccaccgaccaggccgaccgtgccgccgactccgccgccgaccacgccgactgtgctgccgactgtgctgccgactgcgccgactccgccgccgactcgacgccatccacacctgcagcgccttcgtggaatcggcggccaacctcgagggcggagacgacctgtgcaattgcgtgagtaacttggtcgggatgatcggccaacaaggcggcgcgctgcgtcaccagcatcctgtcgattcgcgcaatggcgatgagatgcggcagcggggccaggtccacgccgaccgggatgcgctttgcaagctcgacgtggaagctgccacgctcagctgccggcaagccctcgaacatcgagtcctgcaggcggatcaaccattccggcagggcgcgcgcatccgccacggttgcgtgaaagctagtgctatccgggtcgatctcgtgagcgaagcagccgaccgagcagccgcggaattggccgtcgtgcatctcgccaaacgtgccagagaccagcatgtcctgtgcttcgtgccgctcagcctgagcaacgtgtagtgccttgagtgccggatcgttattgaaagaaagctgtgccatgtggctgtctcgtcgtgggtgtgggcttagtatgtcacttacggtttacttctgcaagcgcgttttcgatgtcgcgcatcacagtatcgatcggcaccgtacggtcgtagatgccgatcggcgtcccgcccgggtgcccgtacagggcgtgcgcggtagcgccacgttgtgagacgcaaatcacgtaccggccgtacttggagcgcatatgggagattctggcgcgcattaggaccgccagtgccggtcggcgtttcgcgactgcaccccgaccatcgcggcacgcgtcgcggggtgacgactgaaagcctcgatcagcacatcgcgggtgtacgacttctcggatgaccaggctttgccgacgaccggcaccacgccagtcggacgcttccagatcctgacgaccaggctgcagtccttgcctagcctggacagcgtgccacggtcgagcgtgacgccggggagccactgggccgcctgttcgacggtccacatcggttcttgcgtgaatgcattcattgtgggcaaatcctctgtgggttacagggtgaacgcgcagccgaccagtgccagcagcgacagggcgacgctagcggttgcgccgcaggtcatcgcagtgatcgtgcggtcggcattcggcgccacgaaggacagcacgaagccgaggacgataaggaccagggcgatagcgccgaaagctacggggatcaagatcggatcgaacatgtgggtgtctcgacggtgtgggactagaatcccacatgctatcccccatgtcaaccaaaagttacatcgattttaactatcgaatagcgccaaacgggttgatcggtatgacgttgtcttcggcaggctcccaaccctccggggcgcggtagacgcgcaagccacgtgcgtcctgggtcgcaacccacccgcgcgtcttgagccacgcggcggcctggcgcgcgctgaacttacggcccgagggcgttgcgtccagcgcggtgcgaatctccagcgagccgacacggcccgtctttgcgccgaatttactcaggatcggcggtagcaggtcgtcgagatccgaatcgaccgtaccgcggcccgagcgcatgtcctcggcgttgtacgctttgaccagctcgggcaccgaccgtaccagcttggtgtactcggcccaggaatcgcaaaaacgggctttggcttcggccaggatctgcggcaactcgacggcccaatccagcgggggtgctgtctcgcagagcacgggcatgaagcggctgttgccggtctcgtcgcgattgagctcgtgtttgtttgcggtgccgaacagcacgtaccgccgtgggtgcgacacctcgcggcgatcgtacggtgcgcggtagacgtcctgcgtgtcggttgtccagcgcttgacgtcctcgacctcgcgcttgcccaggcccgacatttcgcacaactcggcgaccggcgaccgcgcggcggccatcgccattttgcgatcctcggtgaacgcaatttccgagggtagcggcacgcccatcgcctcggcgatctgcacgccgaacaggcccttacccttgcgttgctcgccaatcagtaccggcaccaccgggcacggggcgccggggcgcagctggcgcatcaccaagccggcgaagaagacctgaccggccccagtcaatgccgggctgcctggcgtgccgtacaagtccgtgaaaatggtatccagacgggcccgcttgtcccagacgggcaacgacaagacggcgtctttccacgggtcgaccggtcggccgcgtgccacagtctccagcgcggtttgcaacgtgccgactgaaaccgtggaggcgccaagacgggtgacagcttcgagccacatgccgatcgacggcaagtcctcgtcgttgagcttgtcggcgcagacgtcgtaggtgagcatgagaccggcttcacgcgcgagcagcttggtggcgaacaccagattctgcacgctgctgtggcgtttgtcggcgcggtcgggccattcctcgatcgtgccgcacagccgttcggccgcaagctcgagcgggtgtgatagctccgacgcatccgactccccgaaggcaaagaaatcccccagcttgtgcgaccacacgcccttgacaccgcgcagcgtgaccacctcggcggcgcgcaaatcgccacccgacaaatcgtgtcgggtggagtcgaacggatcggcgcaccgccggccagtggcttggtcgaaatgacgcattgcatcgccgaccgtcatgcgcagcggttcgggcgtgtgttcgaacaccagcggccaggacggcgggagcaccttgtcgcccagcgcgcgcagcgcaagagcgcccatacggtcgccgtcgtcgcgaccggccgctaacgcgttggctttgtggtagtccagtgcaacgcgcttggcctcgacgcgcatgttgttcttggcctgacgcaccgcagtttcgaaacgacgaatcgcgatatcacgcaccgccggcatctcttggacgtcgagaaacccttcattggtgcggtatttcgcgctcttggaggtatccgacgaacgcgcgacccacgcatgcgcgtcgggcacgttgcgcgcgatgccgtcgtttagcacgggtgccgcttcgaacatcagccgggacggttgatagaccagtgcgtcggaaagctggcgcaccagcaacgcgccggagcgcgacacgatgatgcggccgcggccggcggcccattgatcgatctgcagccgttgcgcaagcgcggggatgtcggtgccacgggtgacgccaaggtagatgtgaacgccgcgcagtccgcgatcggcgacgtacgaggatgccgaggggcgaccgacgcgcaatgcctggcgcagccacggagaagccgactccagcgcgtccatcacttcctcgactgagctgtagaccgaggtctcggtgtcgacatcgatcaggaacaaccccggggcatccgagtagcggaacgcttcattggtccgagccaccgcgtgtgggttgaactcggagccgcgtcgagtcgtgagcggcgtgttgccgacgatcggcaggcctgccgtgatcgcgtgatgcggttcgaggttgtccagaacggtgcgcaagtccagcagtgacgcgacttcgcgcacttcggcgaagccttcggtcatgtgcgcgattgccgagctcgtgaccttgccgtctttgagctcgaacgacttggccaactcacaagacgtcgaggtgatcagggtgaagcgaatcgggggtgttggggcgtggtcaggcatgtggtcgctctgtcatgtgggtgacgggtgtgtgcaggtcagtctgcgcttggttgtggggggctgtccagctctgcgccgactagccacataaaacgggcagtgagcccgagctgacgtcgcgggtaaccagcggtacggagtgaacgtccggtcgcgatggcctcgcctttggctggtgactgtttgcggatcagcaaaaacagctcctgcaccgagaaccagcctgcgttggtagaaccgaaggcagccacctcggccagcgtgagggggccgccggctttgttgggcttctcgaagttgacggtcaacacgcgccacccggcctccgcgttgacttcctgggcgtacatctgggctttggcgacgatatccatgtggtttcctgggttgtgaggtgcagtcgctaccttacatatccacagggcagttgtcaacccaaggtcaactattcacgcaatagtgaaccaaacgtactagatgccagaggataaagctcttaattctctatatttaatgccaatgaaaaaaaggaaatttaagtcgatataattcttttgatttcacgttttagatatagagaggtttgttggtactttgcgtctgttcctctgcgtcgtgtacttttggttcatgtggtgcgcgagcgtcctctagcattgacggggtccgcagcggcaagtaacctcgcgcgcatggcaaacgacacgctcgcattggacccggcagtttgggatctgacactggacgcctacggcaacgtcgcgacggtcggagacgacaccgcgcaagacgtgcaaaccgggccgggcctgcgcctggctcaagacgtagcgacccgtacgcgggcctggcgcggcgaggtctacttcgacaccgcccagggcatcgactacgacgcgtacctgggtacagctccgctggtcggccagctgcaatctgactttcaaaccgaggcactcaaggtgcccgggtgcgcgacggccttggcgaacttcgacctggcccgtacgccgcgagtgctctccggcacgttgctgctgtcggatcaggccggtaacggtgcgcaggtcgcggtatgagcttgcagcagattcccgtgcagcaaagcgcaaaccaagcgttctccgtcgtgctggatgaccgcaacgtacagatgacgctgcgcactacggaaactggactctacatctcggtgctttccgacggcatcccagtggtgactgggcgccgctgtctggaccgcaccaacctgattccgtccggcgcctatctgggcataccgaacgcgttgttcttcgccgatctgcaaggtgaagcggaccccgtgttcgcggagtttggcacgcgcttcgttctgctttacggcgacccggcggcaaatggggcgacagtcgtgccgacgcgaccctcaggtgcgacggcgcgcccaattaacgaaatggcactgctctatgatggcgcagcgtcgtacaatggcgagtactacttcggagcaacgtagtgtcaacgatcccagaattcccgggcagcgttccggtgccgatgatccaaccggatgatcgggtacttggcggacctgcgggggctgcgaacaagcaggcgattgcgctgatggaaaatgccgggatcctgtacgacacagtgaccgccgcgacccaactcgcaacgactgctgcatcggcggcccagaccgcagcgactaccgcatcgacggcggcaagtactgcgaccgcggcggcaagtactgccagcgccgcacagactgcagcccaatcggctgcacaaactgcgaccgcggcccagaccgcagcgggcgccgcggacagcaaagcgaccgccgcacagacgcaagcgggtgcggcagcgacgacggccggctcggcagatagcaaagcgacggccgcgctcaccgcggcgcagtccaaatcgacgcgctacgacctgggcactgtcaacgtctcctattccgcggccttggcgctcggcgcgggcgctcgtagtgtcgttgtgccctgcccgggcgccatggtcggcgacgcggtgttcgttgcggcaactggtgcgattccggacggctacgcggtcggcgccgcccagtgcctcgtcgccgatacgatccgtgtgtcgattgtgcaccccgccttggtcctcggggcgaatttcacgatcccagtgaaggcgttcgcactgcgctaggcgcttgacaaccgcgcacgctgcgtgcaacctgtcgttgccgcaaatgtgggcggtccgtgggtgtggttgggccggggcgtgtgggcgccccggcccattttatttggagccatgccgtgctcaagcaactcacagtcaatctgaccggcgctgatgctgggcgcccgattaccctcatagagcgacctgcgctcgtcgcagaccgtctagcgcgcgctgcattggccgaagcaggcgcgcctctcgccgggggcgtcatcggcttggtgttcgagcacatgggcgcagtgcgccagctcggtgagcgatccaacgcactgctgcagccgttcgtagacgccgaccggcagccgttgggctgggagaacgtgttcgtattgcaacaggccgctttgctcctccatgcgggattcgtcattgaccggcctcgactggaagcgcctgttgccatgcacgtcgccgggattcagcgcggtgacagcgacgttgcggttcacttctgctcgtcgcatatcgccaccgtgctacactccggccacgccacgtaccgcgagttagaaaccgtactcagcaccgaggacgtgttcaacctggtggaactggtcaacgtcgcggccatccgcgattggcatgccctacagtcgagcaacccatgacccacaccgacactcgagacttgacgatccgcgctactactggccgcgacgacggcaagtcgttcattatcgccgagcttttgccgtatgacatggccggtttcatgctgcgcctgatgtccgcgctgcaggtacctgacgtgtccgtgatcaccgactttgtcgatgcggccaagcaagccaagcaagacggcaaggcgatggacgggacgtcggtcgtagagaccgtcgtgcagctgatgatgggttgcgaccccaaggcagtgcacgcattgatcggcgatatcctggcgcacgtcagtatcgcccctgacccaaacaacccggtcgcagtgcgtcgcgcgactgcggtagacatccgcgagatggccacgctgggtcagatcatcggcgggttcttcacggccaacatggtcaagagcgcgtaagccgtggcgctatcgctcaacccggttgcggtgttcaacgcgacggcgttgttcgccaaagcgtttccgcggatcagcccgccacaggccatctacgcggttctaaacgccgataccgcgatcccgctgacgatcccttcgcagtggatcgaagtcgcgccgcgctacgaggcacaggtggccgactacccaatcgagcagggcggcttcgccgcgtacaacaaagtgcgccgccctcggacgatcgatgtcgtgctcggcaaagggggctcggatctcgcccgcttcgcatggctggccgcaatcgagcagcaagaggcgaataaccccctgcagctgtacaccttaatcaccccgcaaggggtctacgccgactacacgatcgtgcggatgtcgcaccaaacccggcaagaccgcggctcgaatattctgtacctggagatccaattctcgcaggtgttgcagatccagtcggcgcaggatgcggcctccaacccgctagacgccaagtccgggccggtcgcacagctcgggcgggtctactcgtctgtcgtctctacagccacaacagcgttggccaccgccaagcgctacatcggcggataacgtatggccagcactgtagtcgacgagctcgtcgtaagattgaccctcgatgcggagccttacgaggaagccgagaagaaagtagatacgcaagctagaaccaccgagcgcaaggtgcgcgaacgcaccgatgcgcagaccaagcgcgacaaagaccagctgcgacggctgcgcgataacggcgcgagcgtcaaggcgttcgcggcaaccgttctgaccgcggtcaccgtcatgggcggactcgccgttgctgcgggtggggcgctgaccaacctactcggcttcgagaccggtttgcgccgccaggccgtcggcacctcgttgtcgaaccgtgagatgcaggcgtggggggcgacggcccggcgcttgggcgccgatgcagacgccggcgccgaggcgatcgccgcgctcgcgcgcgagcaacagcagttcaacttgacgggcaacgcgccgaccatgcaggcgcttgcgcgcctcggcgtgcgcgtcggaaaagacgtcagcgtcggcgacatgctcggccaggcgcagcagatctaccgaagtgccgcgccggaacaacgccaacagatcgaaaacactctgtccgcgcagggcgcctctgccgatttgatcttgatgatcaagtcggagaaagacgcacgcgccgaatatgcgcgatcatttgcccaggccagcgacgaaaaccgcaaggcgctcgatgcccttgccgactccctggagtccatgaaggcacaggcggtcagcgtcgctacggtgctgctggacgtactgcaacccgcggtcgaatggggtgcggtcaagttgggcgagttcgcgcgcgacgtgtccacgttcgccggtgaagtgcgcgacgccgggggtggcgtcgatgccttcgtcgatgcgctgaccaagcgttcggacaacgtgtccgagttcgtgcgagggctggagcacgctgcgatgcggtttcgccagatcggcgacgtgttgagctacgtgctcgacaaggtatctacgtgggctacgtccaagtggctccagtttctgtccggaggtaacggacagaacgggaaggacgtcagcgcaatcgccaacatggcgcgcaccggggcccaggcggtcgccagttgggcgtcgaacacctgggcgggcgcggtgggtgcagcgcgcgaccctggacgcggcttgccgcgtaacatcgagaacgacactgccgacggcttgccgcgcaatgtcgagaacgatcgacttggggcaaagccctcggcgaacgcgcagcaattcatggaaacgctggtcaccaagcacggcttgacggtcgcccaggccgcggctgtgacgtccaattggcaaggcgaatcgtcactggatcccacggcttacaacccggccggtggcggcaccggcgcgcgggggttgggccagtggcggggcccgcgcaccgaagcgttcaaacgcatgtacggcgtggatcccaccaaagcctcggtggacgagcagatcaacttcatgctcaccgatccctatgagcgccagctatgggaccaagtcaagcgcagcggtggtgacgacgcctaccgactgggcggcgaatactcccgccgctacgaggcgcacggcaacgttgcagaggacgcccggcgcgcacgaaatgcacaagtacttgccgatagctacggcgggtcggcgcaacgcagcggaaccggacagacgacttcggccgcgactgttttcaacattcagaacgtcgaggtcaaggcgaacaccccgcaggacttcgtcggtggtattcagcgcgtgaccggcacgcaaaaccatgttggggtgatgcgttgaacccgttcaaagaacgcaaggtgcaggtcatcgtacgtgtgcagcgccccgacgccgagggcactgcgcaagacctggaatacgcgttcgagcagcatcggatgtcgattactgtgtcgcaaggcggcaagcaattcggcaacgcgaaagtagtcatatacggtgtacgcttggacgccatgaaccagatcgcgcgcctgtggctcgaagcactgacgccgcaagcgaccgatatgctggaactcaatgtctgggatggccaggcgtacctaccgttcttctccggggtgatcacgtggtcgaccgtcaatgcctcacagcagccgcaggtcgctctggaaatcgaagcgaacgacgcgatggcggggatgatcgcaaccgcaagcccctacgcgcaagagggcccggtcgcgctgtgggatgcgcttaccgcgatcctggaacccgtcggattcgtggtggactacgccgacacggtgcccgatatctacatcacccgggcccgcgtgaccgggacgccaatcgaacaggcagggaagctgatggcctatttcccagatctgacgtggcacgtcaacctgcagcggttcattgtgcgcaacgcaaacgagccctacgacgaaaacgcgatccccgtcgccagggagacgggcatggtggggtatccggtatattcgaccagcgggttgtcgttctccacgttgttcgatgcacgcattcgccccggcgtgccgctagacgtacgtaccgagttcgatttcgtgaaccggacgaagtgggttgcatcggtgttgcagcacaacttgcagcccaatacgccaggtggggcgtggatgaccaacatcgcagccaattcgtttggcactaaggggaacaccgatggcgcgagcgcctaaaatcgacgccgcattgtcggcggtgatcgacccttcggacttcgtggcgcggttcgcgcgcgctggatccaacatgcgcacgcaggtgtttcgcgccgcaagtggagccgaggcgctcgagctcgcaaacgccagcatcgccgggttggattgggagttagtcgaattgctgacgctcgaagaagccaagaagcggcgggggctgtgatggccgccccaaagctgaacgcgccgttcgagacacaattcaacgccgagcgtgcacaagagttcatgatcctgcgcttgctgcgtcagatccacaccgccgatgtggttaaggtgctcgccgtctacccgaccgccggaactgtggggttcgtggacgtgcagccattggtgcaggaccgcgacaccagtaacgtggtgatcgcccaaagcccgatcttcaagttgccgtacctgcgcctgcagggaggcacctcggcgatcatcttggaccccgcagtgggtgatctgggactcgcagtcttcgcagagcgcgacatcaccaacgcggtcgccacccgggaagcgggcgccccgccgacagatcgcacttatgacacgggtgacggcctgtacttcggcgggttcctcaatgcggaccccacgcagtgggtcaagttcactcaggccggcggcatcgatatcttgtcgaccggcgatttgaacctgcaggccgccggagcaatgaccctgcaagccggcggtacgctgaccatgaccgcggcaaacgtggtgatcaatggcactacgacgttcaacaacccgataatcgccccgcaagccacgatcggtggaattcccttcaccacacatcgtcaccccaacggcagcccgaacaccggcgcgccgatcgcgtgaaacgctgataccatagaccgatgagcacaaacgtccccctgccaaagtttctgccaaccggcttgtcggtgccctcagagccggagattctggcgggggtgcaaaccgactggatccacgcgtttgccctgtcagggaaagcactcaacgccgagttgaccacgcctcaaggtcagctgcagcaaacccaagcgtttattttggcggccatcaatgcgcagctgctggagctggtcgctaacgtcgatccgatgaccagctctggcgcctggcaagatgcgctagggcgcatctacttcctgacgcgacagcctgcgacctacgctacggtgcaagcgaccgtacgcggcacagttggccaagtgttaccgctcggagcgcaggcacggtccagtgacggcagcttatgggcatcgacccaggccgtgacttttgggacgggcggggccgcgacggttgtgttccgggcagtgcaaatcggtgcaggccccgcggccggcgtcaatgacttgacgatctaccagcagcagacaggttgggagtcgatcagcaacgcgacggggagcgtgccggggttggatgtagagtcacgccaatcgttcgaggagcgccgtgcgtcatccgtcaacatcggcggcaacggcacggcgagcgcggtgcgcgctgccattgccaacgtgacgggggtgaccgatgtctttatctacaacaacggtagcgtcaacccgatcaggtatggcgcgacgaactatccgatcccggcacacagcttgggcattagcgtcgccgggggcgcagacgcggacatcgctgccgcaatccattccaaactcgactgcgggtgcggcttgccgaccgcccccggtttggggacattgatcacgcagctgatcgaggattcggaattctatgccgagccttacccgacgtatctgattcgcttcgtgcgccccgcacctgtgacgatctacgtcaccgtgaacgtcgccaatctgtcgacattgccgagtacctacgtgcagagcgtgcagaatgcggtcgccacggcgctgacgacggggtttgcgactccggacggctctatcacagtggaccgagcccgaatcggcggtcagatcgtcgccgcagaatacttcgccgcagtactggcgctacgcggcatcacccccgtgtcgattttcattggtacgagcccttctcccaccagcggcgctgcgttgaccatgggcatcgatcagttgcccgtctgcaccccgctagcggtcactgtcaacgccgtggcggtctgacgtgaccgactatctgcgcactgtcatgaagcagtacgccaacagcccgatcatttcgggactgttggcgagcttcgacgagtggtgcgacctgtcgcggttcactgccgatttcctctacaacctgtgggatatcagcaccgcgacgggctatggcttggatgtctgggggcgaatcttaggccaggatcggtacttgcagattcaacaagtaccgggtaacaacttcggtttcaatatcaacgatgcggtcggcacgcaatggcagccgttcaatcaagccccgttcttcaatggtgccgctggcgggactactgcgtttgcgctagaggacgtgtattaccgcaagctgctcttggtgaaggcggcgtcaaacatcgccagttgcgactgtccatcgatcaatgcgctcatgcgcgcgatgtttggcgatcgcggtaagtgctacgtcggctacgatccgaatcagccgatgatcatcggctaccacttcgagttcttcccgacggccgtagagcggtctatcattgaatcgggcttgtttccgcagccggcaggcacaaccgttcgtttcctgtacaaaaacctcacgtacgcgccgttcggttttgctggtgcgaacactggtgcgaatcctgaatacgtgacgggcttcaatcaaggcccgttttacaacaatccgtaaaggcgacttaccatgcaatctaccggccggccaaccaagttccttgtgccttttgccaacaacgactccgcgaaagtcgagctgccgctgacgacggccgacgccacgcgcgcttcgttgcgcacgggttttccaccactgaccggccagccgcccgaggccggcggcgtgcctccgcagttagaagacatgaacggcggactcaaccagatgagccggggcgcttggtggccgatgctcggtggccggtggccgtatgacgcgacctttgctgcggatgcggcgatcaacggttacccccagggcgcgttgctgccgtctgcagatggcctgggcaattgggtcagcaccgccgagaacaacactgccaaccctgacgccgacagcaccggctgggtgccaggcgcgttctacggcgcgaccgcgctgaccaatcagaccggcggcactgtcacactcgtgccggcgcaagccggcaaacgccgcatcacggtgagcggcacgctgacatccaacttggttatcgtcgttccgaattggatctactcgtgggatttcatcaacacgacgagcggcgcattttcaatggtagtgcgtaccgccaccggggctgcggcagtagtggaacaaaacggcgagcgtacgccggtattttgtgacggcaccaattgcacgttgggcagcccgaatatcgcccaagccacacgcccaacccaagcgatacggttcgatcaagctgtgggccgtctgctcaacgtacaacgctttacggcgagcggcacgtacacgcctacccccggtaccgctcgcatcgtggtagagattgtgggcggtggcggtgcgggtggcggtgcccagtccaccaacaccgcggcggcggtcggttgcggcggcggcggcggtgcgttcgtcaagttcatgctgactacggtacctagcagcgtctcggttgtgattggcgccggcggcgccagcgcaaacggccaaggtggggctgggggtacgtccaacttcggcgcgtacgcggcctgcagtggcggtggcggcgggcgtacgttcggtgcggactccagcattcctaattttggcggcgaaggtggctccggcggggatacagcgaccgtgggtgccggcgccgttgctctggttgcctcttcgggcgcgtctggaggtgccgcaacctcgctcggtgccggtgcttacctgacggccggtatgggaggtcctacgtatttcggcgggacggcaaaaacggcaaacacgactgcgggtgcgagtgcaaaagcaaacaccgggtgcgggggctccggcactacggcggcatccggcgcggtgacgatcattcaaggcggcgccggcgcggcaggtctatgcctggtgtacgagtacgcctgaccaaagagaaacccgccgaaaggcgggtttcttgtttactcggtgtcggcctgcgactccaaggcttcaatcgattgcaagtacgcttgcgcgtcagccaccgaggagaactgcgccaaggtggcgtccttgtggtcaaggatcgctgcaccagttgcggtggcggcgacgcgtcgcggacggatcggcggggtcaggatgataatcgtgctcacggcttcttctcgtttagctgctcgggtttgagcgagggggccagcgcgtatatcgcggtcaggtgatcttggagccgatcgactttgcgctccagcgcggcttggcgcactgcggcttcggtttgtcggccgccattggcgatgttccagccgaagaacagcgcggcgatgaccaccacgacccacatcgccgtcgacggcccctggccgttgatcgtcgcatgcccgccgttctgacttccaaactgccgggtcagcaggtcgtcgacgcgcgtgatgagctgttcgcgttgttcgttctggtgttgctcatccatgctgcatcgctccttcaagtcgatcgagtagtgagttgatgcgcaatacgtgcttgcccgtcggctcgtcacgtgccgcggcggtccgtaggtccagcagggcgctctgcagttcggcgcgaatcgtcgcgatttcgagctgccgggccgccacgcgctccaaagcgaccacgatgtagggcatgacgcgcatgcactcatcggcgcgcgaacgcatcggcatagcgatggcgcgacgacccctggcgatcagctcgctcaactcgctgttcgacggcgccggcttgccacggtatttgcgctccagccgttccatgctcaccacccggcgaatgaatcggcgccagggctggtaatgccccgcgaatacgaacatgccccagatgccccacatcagcgcggatccgcgccaggtgtagatgttgccaccaactgcggcggccatcagcatcatgaagctgataaacgtcacgatcaggtgcgacagcccttggaagaagtcgatcgcgccgggccaggtcagtgcctcgcgcagcgtcggggatcgcacagcgttgagaccgaatagcgcggtcagccagatgccagcgagcgcaggaatggcgaccagcgaccacacgtgcggcgtgaccgcggcggtgtaagtgtgcagcacgttcagttcactcagcatgcgatgctcccttgttggtggcgcgcaagcgcgcaagcgcgatttcgatcaccaccggggcccagtactgctgcgtgagtgcgagccccatgcccatgacggcctggtagcccgctccgttccatacgtaccctgtccactcgggaactcctaccacggcgacgagcgtcatgataaacgatacagcaaaagcaccaagcagattacctttatgttccacgcgcttgttccacacaccgacaaacgcgccgaaggcaatggccatcagcacgttgaatggcacgcccaaccccacgtccagatgcacccagggggcattcggcgctgcagctgttgtcgcgctggctgcgatgacaagcgcagcaagtgcgttggttgcggccacgaagccccctacgaaaatgaacggtcagagaataccaaacaactgcttggctttggacaacttcgtccggcgatcttctagaccccgaaggccgccattgatggcgcgggtaacgccttcgaggtcgtcggcctgggcgcgcgtccggcataccggcctgcgcaccgtccaataccaaaacgcagcctcgaccgcgtccgggagctccgccaatagctcgggattctcgacgcaccgatcgtcgttgtacttccacgccgaataggccgcatagttgctgcgacccgtgcattggatcagtccgcgacccttgaagcgcgtgccgtcgcctttctgcgtattgccgaggtcggcgcggccctcgtaggccgcgccggatgcgtattcgaccgcggtggcgaacccgtccgattcgtgcgcaagttgggcaatcagatgcgccttctccagcggggatgcgatgccgtgccagatgcaaccatcctcgatcggcttggcgtacttgccagcacccagtttctccgctacggtttcagtgctcatagtcatgcagtcctcagcggccgcgcaggcggctccagaatgcggcgatcatactccggaagcgctgccagcgcgacggacgctttagccgctccgtcacaccaccctcggtagcgaataaccgctgcaacgctccgtgcggcagccccgaggtgccgtgttttgtcacgtacttgtagatggccgcgccggctaccgcatcgtagcgcgccagcgcgcgccgcgaccccagcgtgtcacgcgtctgcgcgacgtggaataggtacgacgtcgaggaggaccgggggtgtacagttgcaccgtcggccaccaggccttcggctaggtactgtttggcctgctgcagcgtgctcgcaagcttacgatcgtccatgtcagtactccacgtacttggggcgaagatgcgctggcagcgcgtcgaatgcgaagttctcggcataatgttcgagctcgccatagtacgatgccaccgcagatgcgccggcagcgctgccttcgcggtggagtgcatcgacgagctcgtcgacggtcgggttcaccagcaccttgccggtgtgggtcaagacggctttcgacagattgtcgcgcagctgttcggccttggagacgtattcgacgtggagttcggccagggaggtcatagtgggttcgatccttttggggtggagggtgcgcgctgctgcgctagcttcggacgcttctggaatggttgtgaaagtgcccaagtgcgtgtattgcccaccgatgctaccgacatagcgccgtccattaggcgcgactgtggcatatacgccagttagcatgacaactctgtgatcaccacgcgcacaaaccccgacccactacaaggccctcgtagaatgtgcagttcgtcaatttggctatcgtctcgccacacgcgttgtttcgtgagcaagtcgcacaacagtttttcgcggttggccaaatcgtaggcgcgattacgatacgaagcgggtccgtgcacatatagcgtaacggcgaggcgcccctcaagggtagtaacacgacccactggcaaagcgccggctgcagctttcgtccaagcgcgcgcggcggccgacagaatgatgcgtccgccaaagacgcgccatattctgttgagagacggaggtaggggtagcactatgtccatcgtggtctcctcgcgaaaccgcccggcgtagccgggcggtgatggtcaccaaggaatttggtcatcgtccaattcgattagcggtgagttggacctactcaccgggccgcgaaagggttcccggactgggccgccgtaccctgggcgaacggattggcgttcgccggcgcggctgcggctgcggctgcggctgcggcaggctgcgatgccggagctgcgggttgcgctgcgggcgtttggccggggcgtacgccaaacgcttcggccgaatcgttgccaccagcacgacgttcgccgccaccgaccgacatgagaccgagcagcccgagcgagatgccgcggcgattggtcttcttgtggaaccagctgaacgcatttgcgttcacacgcacgtgttgccccgagaaaaactcggtcttgatgcgtgtggtgttcagcggcgtggcggccagcgcttcgcccgaatccagatacagctccggagcgtattgcgacgacatgcgggcgatcagccagttgtccggaatgccgggcgtgggcttggccatcgaggagttcaacttgggcgccagttcgtggccggcgagctggcccgattcggaaaccgcagtcatggcgctgaccagatcgctttgcgcttccggcgggaatgcgacgacggcgtaatactccagcggggcatcgtccgccttgagcttgttcttttcgggagccgcgagtgcggaatacaacaggatggcggtgtggtctggaatgctcataggtatctcagttctcaggtctcaggttgataggaagcggcccagttcagaaccgcgatacaacggtattacgtatgtggtgagatgtcaagcagtttcgaagggtctgcggcggcgcatctctgcgcgcaccgctgccagaccttcggcagtcaattgggggcgacgccgcatccggtcaacatgactggcgtctacgaatgctacatcacgcccacgcagcggctgtcctgcgttgttcagaaactgcggcttagtgtgtttttgtagccaccaactgggcttaatttggaatttccgcccgcagacgctggttccggtcattacgagccaaactgtttcgcccggacttatgtccacacacaggaaaggccccgagcgaaactcaccggggttgatgcgtcgaacccgggaatctgcgaagagcacggcagtgtcgagataagccacgattccgggttggatttgatcgagggttaaagccatcagttgttctccgcctttccaaggtactttgcgaacgcgtcgcgcgcaccgctcaggttcttgcccccggccggcgagtggatgaggacgtcgggagcgcgtccaatcgccgcggtgatggcttcggtcgggatagcggtctcgcgcatcttgcctatgctgggcggcaccagcaggtcgtagcgctcgtggatgagcagttgttcgatgaccacctcgggatttacccacatctcggcgcccttgcgccgggtcgtcttgacgactgggtctcccgcttcggcgagcatcttgacgcgctcgcgcaggtcgtcttcgaattgcttgaacgcgctgcgtgcgccccacaggtgcatcacctcttcgggcgacaggtcgaccacggcccgcctgcccgactctacgtccaatgcggccgtgccgtactcggacgcggccgggcaccagcgggccgacgggcagtacttgcagtgttcgccaggtgccgggggcgtaccgcccgggctgctggccgcccgggccaccgcatgcacctcggcgtcgagcttggcgcgctctgtggccagccactcaggggtaagcggcgccagcacctggaacggctcgccgaagcgaatgcgcggctgatagacgaatgcgccagcgtgcgtcgggtcgatcttgtcggtgccgagccagtcggacgtcagcactgcgagtgccccggccacctgctcgttcggctcgtctaacgtaccgcagcctaccggtgacccgccgtacttgtagtcgcccacgaccaggcggcgcgcgacgccgttccagagcatcacgtccgccacggtgcgcaattcgaccccgtggatgtgcgcggtgaaccggaattccggtacggcggacgacgcggtcgcacaatccgaaaacaacgactgcgcgtgcgcgacgtactggtcggcgtgtgcgtcgacttgcgccacccagcgcgtgacgccctccgccgagtaatcgaagccttcgagtccggccggcggctgcaccggcactgtcgagcgttgcgtcgacggggcgaatgcgtccaatacgcgcgcctcggccactttgtgcgcctcggtgccctcctgcgcggcggggccagactgcgtgcggatccgaggcagcacggctgacagcgcgcacttggaccaacggaaacggttggacatggtgaggatgggccgtgacgggtccggcacgaccagtcgtgcgccctcgggtaggtcggacggtgcgggaaagtcgaaggtcatgtggtttcctgggttgtaaggtgcagtcgccaccctacatatccacagggcagatgtcaacccaaagtcaactattcacgcaatagtgaaccaaacgtactagatgccagaggataaagctcttaattctctatatttaatgccaatgaaaaaaaggaaatttaagtcgatataattcttttgatttcacgttttagatatagagaggtttgttggtactttgcgtctgttcctctgcgtcgtgtacttttggttcatgtggtgcggggagacgcgtttcggtccagatgcgatacactccgcacatgtccgaccccacgccccatacagaactcgctccgatcaaggcgtcgttgatcgcggacttggtcggcttgctgaatctcaacttggcccaagtggtcaaggcgtctgcggtcgggtgtccgacatgcaagggcctgggcacggtcggtgacagcgaggtcggtcaggacgtgacgtgcccttcgtgcggtggcgttggtgcgatcgaggcgttcgtgctggacatggacgccatcaaaacacccgaggtgggccgccacatcgagcagtgggagtacaagcagggccagttcgttccgaagtttcggcctaagtcggcggctttcgcccagctgaccaagatcctgggcttcgacaaagcagtgctcgaggtggccggcgccgtggccttcgccgacgcgctgtcagacgagcagcgcgcgcagatcgtggatcaagtgcgtgaactggctcaggccggcgccctgtgaacgcgcaactcgtcccagatcccgtgctggccttgatcctcgcagcgcgcaccaatttcgcggcgttcgtctcggcggtgcatcgaccacgctttgtccacagtcatttttcgttgacggtatgcaaatccctggatgcattcgtggaggacgtaatcgccggcaagcgtcccattctggacctcacggccccacctcaatttggcaaaagttcgcttatttcgcggtgtctgccggggtatttgatcgggcgactaggccccgcgctcgggcaatgtcgcgtggcgctgtcgtcgtatgcgctgtcgcgcgccaaggcaaacctacgcgacgcgcgcagcgtgatggccgagcccatctaccgcgaaatatttccacacgccacgctgataggctacaaggtcggtcaacacaccgccgactacttcgaccacccgttcggattcgtcaaggcgcaaggcgttggcggcagtctcacggggttctctatcgacgtcgggcttaacgatgacttaacgtccgatgcccaggacgcacttagccagaccgtccaagatgggcaccttgactggtacctgacggtcttcggtacccggctccagcagcgtagcggacaggtaaacatgggtacgccgtggtctgccaacgacatcatggcgcggatcaacaagctgcacgagggaaagccgaactatcgccgcctgagcttccccgccatcaacgctcctgacgaggtgggcttcgacccggatttgcccgaaggctcgctggtaccggcgctgcacagtgaagagaagctgcgcgagattaaagcggccatgtctgaggcctggtgggcggccatgtaccagcagcgcccgctttccgaattgggcgccattttcggcaagggcggcgtgcgctactaccgcaaaaccgacctaccgacgcaattcgtccagaccatcatgaccgtggacgccacgttcaaggacgacccgaagcggagcgacttcgtgggtcttggtgtgtggggaaagacggcagacgaccgcgtatggttacttgcacatcgacgtgaaaaattgtcgttcacgcgcacggccgaggcgatcgtcgcgcttaagagcgcctacccgcagtgttcgcgcatattcattgaagccgcagccaacggtcacgcactggtggatgtactttcaaagcacgttgtgggcattgtgggtgtgccagcgcttggtagtaaagaggctcgctggcatgcggttgcgggcatttggcaatccggtcaagttctcctcccacaccccgaagaagtcccgtctattgtgcctgtcgtcgcagaaattgttgcagctcccgacgtgcgtaacgacgacatggtcgactgcatggccatggcgctttatcagctttgcatgcgcaacccgatcagcagcttgatcaatagtgacatcttgcggatggctggggcgcggtagttgccgcgcgcgcgccgcttacttggtcgcactttcgtgtaacatcgcgtcaaccgccccggagcccgctagatgacccgccgctcgactccccagcccgcaccgcaaccgcggcggctcgccatatcgcccgtcgacctggcgcgcgccgcggcgggcgacccggcacgtgcgacgcagacctcgctatctctggcaaccgcagaaccggtcgacaccgagcgctacagcgcgcgcgagcagcaagcggccaaggccgtacacgcgatggactacggcttcagccgcggcaatgcgaccgacgcgctgtcgttcgtctctgcgacgggctggccgggcttccagaccttgtcgctgctggctcagctgccggaataccgcaccatgcacgagacgctcgccgacgaggtcgtgcggacgtggggcaaagtggtcagcacgtccaaggacgccgctgcggcagacaaaatcacgcagatcacacagaagctcgagcagctgaacgtccgatcgcttatccgtaccgcagtaatccacgaccaggcatacggcggcgcacacgtgttcccgcatctgcgctccggtagcgtggacgttcctgccgactctccgctactgctcacccctgcgttcgtgacaaaggggtgcttgcaggcgttctcgtgcgtggagccgatgtggctcactcccaacgcctacaacgcgaccgacccgacgaagccgaatttttacaagccgtccagctggtacatgctgtcgacgatcgtgcacaccacccggctattcaccatgatcagccgaccggtcggcgacatgctcaaggccgcgtattcgttccgcggcgtgtcggtctcacagctggcgatgccctacgtcgacaactggttgcgcactcgccagtcggtcagcgatacggtcaagcagttcagcatcacgtacctgaaaatggacatggcgcagctgttggctccgggcggcgcccagtcgttgcaggaccgcttgaccctgttcaacctcaaccgcgacaaccgcaacgtcggtgcggtcgacatgacgaccgaggacttcgcgcagatcaacaccccgctatcgggtctggatgcgctgcaggcgcagtcgcaagagcagatggccgccgtatcgcacataccgctcgtcaagctgaccggcatcacgccggcgggcctgaacgccaatagcgacggcgagataagggtgtggtacgacttcgtcgcgggctaccaggtgcacaacacaggcccgctcatggagtggattctggatatcgtgcagctctccgagttcggcgagatcgatcccggcttgtcatgggactggaacccgttgtacgagctgaccgacttggagctggccgacgttcgcgagaagaatgcacgcaccgatcagacctacctcgaggcgcagatcgtcagtggcgacatggtcgctcagcgcttggcacaagacccgaattccgggtacgccggcatactggccgaccgcgacgcgctggacgaagtgcacgacttggctgaatcaatcctcgctgaagcgacgaccccacaaccgcaggccccaatcgatgagcccgatgctgaccaacccgacgcgcaagcagaagcaactggcggtgatcgggccgtcgagcgcagctgaacagcagtaccgcaaggcgttgcagcgcgccgtcaaggcgatggccaaaagcgtcgagtattgggcgcttgccaaataccgcgcagcgttggttgccaatcaggacgccgagaacatcccggatcccgaggccgcccaggacgccacgtccaaaacgccattcgacgtgcagcgcgcgctgttcaaagaactggaagccctgcgcactcgctgggagacgtacttcaaggatgtcgccaagcacttggcggtcgacgtggtcaacgcggcgtaccaagcaaacaagacggcgtggcaaggtcgcgtccgcaaagagggattcgacatcccgctgcaactgtcggccgcacagcgcaccattctggatgtcaaggtcaacgacaacgtcgcgctgatccggtcgatcccggagcaatacttcaccaagatacaaggcgacgtgtctcgggggttcctcgccggtcgggatctggaagcgatcgctagtgagctgcgcgacaccggaaaaaccacggtcaagcgcgcggccctcatcgcgcgcgaccagtcgaacaagctcaccgcgcaaatgaacagcgcgcgccagcgcgagctgggcgtgcgttacgcgtactggaagcacagcacggtcgacaaggatccacgccccgggcatatccgcgccagcaaagagctctggatattcgacacgcaggtaggcatcgatttcggggatcagttcggcttcgtgctgccatcgatggcgatcaactgccggtgcgggtcgcgcagcatcatcccggcgatcgacgaagacctcggcccggacgacttgctagccgttccgggcttccctggggcgtttactcggaagccgaagacgcgttagcgccggctcgcgcgagaagcaatagcacttcgacacaacctttgcgccagcgccgtacgccggcatccgcgcacacgtgcagcgtttcttcgtcgtcgtgcgttgcataccacttgtaagcaagttcgcttgggctcacgactgcacctcaccccgggctttggctagcacctcgagcgccattacggcgtcagacggctcgagcggcctacgcagcgtggcaaggaattcgagtgcgtcgtacaactcgggcgccgtgaccattacctgcgcattggcgcggcactgagcctccaagatgccttccccgcccagatgttccatggattggccgtccgcaatcgtgtgcccgtcaggagcaacgatgtagaacacggtgtgcacgccgtcggtgcagccatccctgaacttcacagtccacgggccgggagtccactgtggcgcaccgccggctttcgcttctgcttggtcgttcatgttgttagttcctgcggttgtggtgggagtcactttagcgtgaccttttgtgcttgtcaacaacaacgcttgcacgtttatgccacacagctatcatcgcgcgcatgcctgttgcaaccgctagttacgcgttcgataagaagtcggcccggtcgttcgatgccgacgggcgtatgcgcgtgcgcgactgtgtgctgtccgacgcggatatcaacccgtactacggccgtgagatccccgggtggaaagaactcggactcaagccggacaccgtgtacgagatgtatcgtgatccggacgcgctcgcgctcgccgccgactcgttcaacggcttgccgttgatgatccggcatatcgcccagacggccgacgagccgcgcaaagagcacaccgccggcagcgtctacaacgtccggttcgagccgccgcacttgcgcggcgatctgatgatcgcggacggcaaggcgatcgagttcgtccagtccggcatgctggccgatctgtcgtgttcctaccgctacaaacccgaaatgacacccggcgaagtcaacggccgtcgttacgacgggcgaatgatggcaatcgacggcaatcatgtggcgctcgtcgaagacgggcgcgcaaccggtgcgcacgtcgctgatagcgcgctctcttcccaaactggagcaccaaacgtggatccgatcgaaaacactcccgcaccggcggccggcaatgccgagttggcgcaagccctcgtgctgctgaccgaacagctcgaagcgctgaaagccgacgtcgctgcaatgaagggcgccccgtccgacgcggataaacccgtcgaaggcgtgccggccagcgtcaacaccgcgcacgacgaagacccggacaacgacaaagataaggatgacaagccagtcgcgatggacgccgcttccgtgcaggccgttgtcgacgctgccgtcacgtcggagcgcacgcgcgccaaggcggtcgagcaggccaagcgcgattgccgtccggacctgggcgacatgatcgccatggacaacgccaacgacatctatcgcgaggcactcaagcagcgcggcgtagacgtgtcggcgattcccgcaggcgccgaaatggcgacctaccaggcgatccagtcggtcacgcgtggctcgcgcctggatgtcaccgtgtcgcgtgccaacgacagcgcttctggcgcgcccgccttcgacacttcgcgtattcgcaatctcggtcgttaagaccaatcctcgggagttactgaaatgccctttcaatctactgttgctgtcaacccggcgattggcgtacctggcgactttgcctcggtcaatccccggcagttcgtggtgtccggtacgctgaatcagcgcatggtcagcgccccggcctcgccgggccccgcgttggccggcaagttcggtttgctgtcggcgaccggcaccgtgtcgagcacccccggctatgcggccgcatcggcgactggcgccgcaacgcgcatcggcttcgtgcatcgctacatgggcgcggcgctgatcaccacctggctcggtgaaacttccatgaccatccagcctggccaagcggtcgagctgttcgcgatcggcgatttcttcgccacggcagacgcgatcaccggtactccggtgcgtggcgctgcggtcatctgggatccggctgccggcaccatcaacatcggcgccgcagtgtcgagttccacgatcgacaccggcttcaagttgctgagcgagacggccgtcgcaggtcagaccgtcatgatcggcaagaacggcgcgtaagcggccaccatcgacaacctcatacaggaacagtgaccgtgaacgaacgtcaaaccatcaatgacttggcccgcgtcggcatcgtattgcccgatacggtcaaacaggtctccaaggaagcatccgcgtacgccaacgacgcgatcagtctggcccctacgctggtcaccggcgcgagcgccggtatcccggcgtggatgtcgatgtacgtcgaccgccgcgtgatcgacattcagctcgccccgatggccgcagagaagatcctgccggtcgtcaagaaaggcgactggaccacgcagtacgccgtgttcatcaccgccgagccggtcggtcaggtcgcgacctacagcgactggtccgccaacggcatgtcgaacgcgaacgtgaacttcccgtcgcgccagaactatatctaccagacctggaccgagtggggcgatcgtcagctcgccatcatgggcgaggcgggcatcgactgggcagcacgtcaagagatcgcctcctcgaccgtgatggccaagttccagaacagctcgttcctgctgggcgtggcgggcatcccgaactacggcctgatgaacgacccgacgctgaccgcgccggtcgctgcgaccgtcaactgggcgaccgccgagccggaagccatcgcgaacgacgtggtcgcgatggtgggccgtctgatcgcgcagtcggcgggtctgatcaccggtcaggaacgtctcgtcatggcgctcgcgccgtcggccctgaacgacatcaaccgcacgaacagcttcggcctgtcggccggtgccaagatcaagcagacctacccgctgatcgagtacgtggccgtgccggaatacgacagtgccggcggtcgtctggttcagctgtgggcaccggaagtcaacggccagccgtctggcgaagtggcgtacagcgagaagtaccgctcgcatgccatcgagcgctactcgacctaccagcgccagaagcacagcgccggcacctacggctcggtgatctacttgccgttcgccgtcacacaattgttgggcgcgtagcccagtaacaccgcaggaacaaaccccgcctaggcgggg

SEQ ID NO: 16 - DNA, 43667 bp, unidentified
  misc_feature 1..43667: note = the genomic sequence of a bacteriophage
  source 1..43667: mol_type = unassigned DNA
cgcgcccccgtacgcccacccggtacacaccgcacgcatcacacgcgggcgcgagacgatgcacgcgcgcgtcgcgagggacagccttgacgtacccacatcgatgtgctaccatcgcctcacacgcgcacacacgggcgcacacggcatgcgcgattcctctcccgacatgggctgactggcattgctgaatcgattcacaattctcccgtcgaaagtgcttgacatggccgacggcatgccctaatctacacccatcgcagcaacacaccgctacgacgcgacacagggcttgacacgggcatcgcagtacgccatgatggctcccatcgacaccgaacaccgggcatagtggcggcgcctacaagcggcctagaggcacatagcggcggttgcgtattctctcacgggttacgctagggttgagcgcacaggcgggacatctgtttcatttgctccctggtcaccatacggaatcacgaacatgcgtacgtacacagtcagcatcatctgcggtgcgttcggtcaggagaccggcgaggttcgtagcttccacgctgaggcccgtgatagggaagaggcacaagaggtggtgatcggctggatcgagcaggctagtatgtggcacgctgaggtgcagagcatcactcgcaccagctaagcatacggtaagactcacgaccgtatggtagagttgaattggtacacgtacaacagatagaaacggatcgtcttcacaagattcgtatctgtctttagaaccttcacggttagctccacagtatgcttacggtaagccttgacagttgccactgagcaacgtaagataggcccacagtcagcagacaccgacgacatagacagtagcttagacaggtacttgacattagccggacagtaagctaacctagcaacacagtaagtaacgcagcgatcctcgcagtgagacttacaagagacttgacaacgacctgcgggtcaggcacaatggatgccagatgtagagagtacgatctgactcatcggaacagtcgtgattgtatgacttagggctgaggctcgacggtcaacagacgattgaactaacgacagatcacaacgcggatgacgtaattgaatgcggcttagtaaaccgcagggaccactcgcaagagtgccgcgtaagctacgacagtagcactcatcacctacggtggaagcccgtcaagatgagtaagtcagtgtagtgctgacaggtgcgtcaaagaggatagcaagggtgggtcataccatctgcgcaacaagggacccgataggttctttcccaccgatggcttagtgcctacggttatagattcacccgaatgtataggtgcgggtcgagccacagcgatgatcgccaagagccgacgcatctatatttttgggttgaatcacaagggcattagtcatagtgtccttgcctttcaacctatgaggctaacgccatgacattcaagcagcttatcaaggggttccgcaagagccgtgttgtgctggacctgcgcaccactgcgcaagagcagcgagtcgctgacatcaagcgtaaggcgcagcgctacgagaccctcaagcacaccgcaggtaagccgagcgtgtatgctgaggaggccgcacgcttgaaccgcctgcgtgctgagttccgggctgacgcgagggctttcgcatgaagcgccgcactgataatgcactggcactcctgctgctcgtggtcgtagtgttcctgctgtggcagacgttcaagccgcagcccacacccatcgatgcacccaagggcgaggtgatcggcgcgctgccaagcggtgcgctcatcatgttcatcgacaacgagaatggcgtggcttgctacagctacctcgccgctatctcctgcgtgaggctacgttaatggtcaagccacgtatcaaggcggacccggtgctttcctggacacgtgagagcggcgagcgcgtcaccatctacagcgtataccacggtgaccgccaggttatgggctccgctggggatagcgtgcggaagtgttggcactggtacctgcgtatgcttgaggaccgaccgataaagctgcgaggtaaggactgatgagaaagccgcgcctatacctgagcaagaaccttggttgggtagcccgtcaccacccttggctgaccattaaccaaagcgactggctgttcgatctgtgcctacagctggacgaactaaacggtgtggtcatatgatcaccctcgctgcacctcaactggcggtgcttctctgcatctctgcactctcaggctgcgcattcggcatcggcctgttcctcatcgtacatcacaagtgagacctatcatgaccgcacatatcgaacgcaagatcaaggccatctcccgcctcggcaagaagatggacgccttcattcaggacactgccttgcaggtggtgctgcactgccacacccacggggaaatttccctgctgcacaagttgtggtccgccatgcaggacttcaagggcgcacgacacaaggcgatggacgagtggatgaagcgcaatgcgccggttgccctggtcgatcccgacaacatccccgacgacaagttcccgttcacgctggacaaggatcgcctgctcgatgaggccgggcgcaatgccctgtgtctggcgcagggtacaccggccaaccactggtacaacatgaagcccgacccgaagctggtcgaggagctggacatcaacgccatgttgaatgccctgctcaagcgggtggacagcgagagcaagaagaacgcagacctcaagatcaagggcgaggacatgctgcgcaagctgcgtggcctggtcagtgctgattgatctactgattggaggtgcgagtgtcgccgtgatgctcgcacttatcctacacctcaaccacatagaacaaatcgaggcacgccatgagcgttctgtatcactacagcaaggggacacttgagacagcactgattgtagcgtgggtggtgcgcgacaacatcaagctagccatcacgcagggagaccacgggacactgaggtacggcatctgttccgagtgggacgacgtggccgatgggcacaacgaggagtgcatgctcggtcgcatccgagatgggctgtactccgaatggccgcagttcagtggaagctcatggtatcctatcccgatgccagagctggacgaggacgactaccagacctaccttgcgtcggtcgatgagttcgacgacccgatgccccggcctcactggatgtacgagcaggtcggcaacatgtgggacggtgagtacggcgcgctgcgcatggactgcctggactggatgatcgacacgcttgagaaagctgtactgtaacagcccgtgcccttcgcaagaggggccacggcgatgcacactacccgcatagcgcagccgggcttggcctcccggtaagatcgctggacgcctagtgtgcatcgccgtgcgactggcacgataaccgaatgacaacgacatggcacaggtaactgtgaagttcaagcgcaaccgcgagacgcgcaccaatggattgcaggcgtggcgtgtggaccgcacgttctacatcactcctgccacgccgtaccttatggcgcaggctgactaccgcgaagcctttcgattctacgggatgatctaaccatgaaacactacgactatgcacacgagggattcaatggcaaccgtgagaaactatctggtccaatcagccgccgtagaaatgctcggtcggatggcgcagctctgcgacccgagcgtcatgctgcgcgaaaggcagggcaagaacaccggcgggccaagcggtccgatccatcgtgaggtacggctgcgcaaggtagtcgagcggctggacctgcgcaccggagagcaagtgaagtacatccacgatccagacatggacgtgggaagctgggaggttgcattcaacgtgcatgcaatcaaggatgctacgccgttcaccgatgagggagtggccgcgctcaactgctacggcatgaacaagaccatgctttatacattaaccgaagaggagtacgacgatgggcaagcagcgtaagggttacgtggttctgtacagcaccaatgatttggcgcaccacctcaccgtgtcacgtgaggactacaccgacggcaccaagttgccggacggactgatgaagttcgttgaccgcatccaaggtgacgacctgctcgccttgctgcccgagccgcaccagtcccagcgcgcagagggtatgagtaccttcaactcgtacgcactgatcacccgtcgtgctgcggcgcgtgccatcgtgcggcgcatgaacaacctgcgcatccacggacgggatgacttcaagctgctggaagtgggcgagttcgaccgcacggtcaagccggtcaagcactggaacatcgagcgccgttactgcctggtcggtggcaagtggagcgactgggaagtgtggagcaagggtgtctcgctgcgtgccgacgctcgcaagcaggccgcgaaggacgagcagtactggaacgaccactcttccaagggcggatacaacctgagctacaagttccgcgccgtgccggtgtacgcatgagcatcctgtcccgcatgaaaggtatgtgggctgggctggtgtccatgctgagcgacaccgaggaagtcgcgccgaccaagccacgcattgcactgcacgaacggacacatcccgacgtgcgtgctgcgttcgaggcgaacccgaactacgaggtggtggacgacaagccggtgcctcggtctgtgttgagcagactgttcgggtacgtgccgagcgcagagccctatatcaggctgcgaggccacggctacgtgcagggcgagacgttcgacgtgggcatcaaccgtgccaagcgtgcgatcaaggccatcaaggacaagcgcgagcggcgtgctgctcgaacccgattcatccagcggctgcgcagcagcggcatcaagagctaaggagtacacatggcacgtgacatctcgaacttcatccgcatcgccatcccgcatggtgcgtggtcggccgtcatctccgaagctgcattgcaggtgaccaaggcggcgggcggtggtacttcgtgggtcggcactggctcctggtttgacgaccagggtgcaggccatcacgaaaacatccgcatcttccagtggaacttcgcatcgcaggaatacccgcaggtggactacgctgcgcgtcagctggtcgagcgcatcttcgaggcgggcgagaaggccgtcatgaaggaacgctactacgacctgggcgtggcggagcagggccgcaccgtggcagggtacgccactcgcattctgttcgcaccgaccaagcactgagccacacctagcctaggtataaggccccgaccagctgggcgggttatcccggctacccatctctcactacacaaggaaccacaacacatgtcgaacaacatccgctccgccgctgacatctccgcccagatcgacagcatcaacgccgatgccgagctgtcgcagaccccggccgatggtggcctgctgagtgtcctcggtctggaagccaaggcccgcgccgccatccagaagttcgaggatgcatccgcatcgtacgctgcgcaggccgcagtgcgcgacgtgaagcagggcgatgccgtctcgctggtgttcggccgtgccgccaacaagcaggtgctgtcgggcaacgtgctgagcatcgagaatgcgaagaccggcctgctgttcaccgtgctgaccggcaccggcgctgcgtcgaaggtcgtcaacgtcggcgccgatgcgctgctgctgtcgccggaagccgtgactgccgccgaggaaagcatcctcgttgccaagctggaagccgagcaggaagctgccgccaaggctgcggccgaagccgctgccaagggtgaagccccggccgcgtaacatctgattgcggtgtcctcttgtaatgagagggcactgcgatgtgcactgagtagaaacgcagcccgtgttggtgcacggagtaagcgcccgcgaaggggactagcctaatgcaaagtaaactaccaccacagtgtgcatcgcagtgcaactccgcactatcaaggagaatgaaatgagcaagcagttcaagaagtacaaagcctgcaccacaaacagcaccaccggtgagctgacgcgcgccgcaaacccggaagcgtcgttcggagacactgcgtatttcgtgtacccgaccgactacaccgagaccaaggtgcgcaagctgatcgccgccaagttgaatcgcgccgaggactcggtgttcgtgaaggcatgcgagatcgtggagttcgtctgatgcacgacctcatccaccaactgtcgaacgtaggcatgaccgtgctggtcatagccctgctgttcatggtgctgctcaactggcgcatcgcagtgcagctgccgctgttcgccgagggcctgttctatctggaacggcagagctacgcacggcgcggtgccttcggtctggttatccagcgcgaggcacggtgggcatacgctgtgttcttgctgggcacgctgatgctgtggccggacatcgtgttccacctgtggtacctcatcggcaagctgttctagtgtatggccttcgccttcgagtaccgcgacaaggacgggtacgtcacccgccgtactgtggaggtggcgcagtatagtgcggagcatctgatcgggtactgccagttgcgcaggtcacgacggacgttccgcattgaccgcatcgttaactcggaagtcatcgacacaaccacaggtgaagtcatcgacgctaccaccggagaaataaaatgagtcacctcgcgcctgacgagtggttgccgcaggctgagcgcctgttgattggcggccgcaagtcagcgcgcggcgaccatgcatgtggtgaaccgggctccctcatgctgacgcgcgagggggcaacactcactgcctactgctttcgttgcggtggggtgggcaagcatactacgcaggaagatcccaaggaaaagttcgagaggttgcagcggcaggcagtggcggatgagttcatgcgtaacgcagtggaaccgccggagccgacgacgtacaacccggccaagtggcccgagcgtgatgcgttgtggttctatcgaatgggactctctccccgcaggatcaaagaactagggctgtactacaacgctgagtccgggcgtgtggtgctaccgatccgcgaggatgatcaagtggtgttctggatggcacgatcacagacggccaagcccaagtgggtaggtccgagcgtgaagaagcgtgggctgttcgccaagtacggacaagggcgaggcgaccacgtggtgctgacagaagacccactcagtgcatacaagataggcttggtgtgcgaggcttggtcactgctcgggacgaaggtgcatagtcgccacgtcttgcagctgatggaacttggtaagccagtggtggtttggttggacgacgaccacgaccactacaccggcaagaaccaagggcagatagcggcgcgccaagtgattggtgtgctgcgtggtgcgggcttggaagtgcagaacatgaccagcccgaatgatcccaagtactactcacagtaccaactaaaggagatgatgcaatgtctttccgtgccgcaatcaaacttgaccaactacaggacaagctccgcgcaatcctgagcgaccacgatgcgtgccttgtcacgaagaacaccgtgtacttcaatcgcttcgatgtgcagggactcaacgaggcacttgaagttccgaaggaagtgcctgtgtacgaggtgaacgaagtgcacagcacgaagttcccgacctgcccgccacgatacaacgtgactcggacatacaagggcaagccgcagttcgccgcaggcttcaagagcaaggcggatgccgacgagtacacgaagcagaagaacgcggccgctgcaagcgaggtggcggatcgatacaagctggagcaggtgagcgccacttggatctacgtgcgggatacctccgacaaggggctgatcagttcggtggttgccaagttctctaccaagcacgaagcgatggcgcgagaattcctcaagcgcatgaacgcggagtaatcaatggagcgcagcgagcacaccttgctgcgcctcgggctggatcgaaagacccacaccaaactgttcgacatcatccccggctctgcgctgacgggtaatgtgcttactctttgggaggcgcagcgtaagttctatgccaagttcaacacggacaagatcaccgacatcccggcgtggctgacgtggcttgaggaccaccagttcgcaacgatgaaggacccggatgcgaaggagctgctgctcactatcgcgggcaagctcaagtacggacccatcgatgagtccatgatcccgcagcttgccaacggctacatccaaacggcgttgagcatggaggtgatggacatcatcgagcggttccagtctcccgacaacgaggaagacctggacgtgatgttggtcgcagccaacgagaagtacaagaacttgatggagcgcagcgttcagtcgcccatcgagagtaccagcatggacgacctgtacgaacaggacagcatggagtatgggttcaagtggagactgcctgaactcgcacagcacatgcgccccgctcgaccgggcgatgcaatcgtgtgggctgcgcggcctgaccgtggcaagaccacgaccatcgcaagcgagatgagctacatgattccgcagatggacctcgtgtatcctgggcagaacaagtccttcatctggttcaacaacgagggcgatagcaagggcatccgccgacgcttgtatcaggcgttgctcggtgtgccgcagtcgcagatgatggcgtggcacaaggatggatcgctgctcgacaggctgcacgaagcagcaggtggcaagcatctgttcgaccgcatcctcatcatgtccatccacgggtatagctcgggccaagtcatgcgcctgatcaaggagcataaccccggcctgtgcgtgttcgacatggtggacaacatccgcttcaatgggctgagtacgaacggcggtacacgtacggaccagatgcttgaggagatgtacaagtgggtgcgcgacgccgcaatcatcgaaggcttcgctgcctttgaaacctcgcaggtatcaggcgatggagagaacgtgcagtacccgctaatgtccatgctcaaggacagcaagacaggcaagcagggtgcgtgcgatgctatcgtaatctggggtgagcagtccggcaacgagcgcggcaggttcctcggcatcccgaagaacaagctggtcgttgaaggtcagcctatgaacccgaagaaggagtgctacttcatgccggagattgcacgcatcctgtcattcgatgaagtcaacgaggagtaaccatgagctactacgaacccgaggaagaaacagatgagtcttaacagcgacaacgcaacgcaggttcgtcacctgtccgaaggactgttccgcagcctgggcaattacacagcccagaggcagcattcctacagcatcccgcactcgaacttgtaccggtggcgtgacacgctgaggaagattggtttccttagcacgaccaagtatgagccgaagcgcaaggtgcagctgctgttcaatcgccacgcactgtgggtcggcgcgcactacagcaagtacaaccgcaggctgtgcatcaacctgctgccgggcgtcaccatctgcatcacacaggcaggcggcatcgctccttaatcaaccgaggatcaatcaaccatgagtaagtacctcgcatgggacatcgagacagggatcaagcgtgcgctcaagcgcaaggccactcccttctacaatgagaacctagtgtgggcgataggctatcgcggatctggcgtgctggataaggtgggcttccatcgcggagtcgatggcataccgcacaactacttcccggacatgctgagcaagtgcaagatcctggtcgggttcaacatcaagttcgacttgctccacacactgcaagagccacagaactacgaggcgtggaagcgctgggtcgtggacggaggcatggtgtgggactgtcagcttgctgagtacctgatcgagggcatggacaagaagtggcacatgcccagcatggatgaggtggcaccgaagtacggcggcaacctcaaggacgacgcgatcaaggcgtgctggaacaacggcatcgacacgccggacatcgaccccgacatgctgatggactacctcatggggaccgacgagcctggtgatctgggtgacatcggcaacaccgaggcgatcttcaagggtcagctcgacgtgctgcgtgcacgtggtggtatcaagtccgcgatgctcaacatgggcgggctgatgtacaccgtcgaggcagaactcaacggcatgaagatcgccgaggctcgggccgaggagctgcgtgttgcactgctcggtgagcttgaggaggtgacgcagcgagtcgccgcctacatcccatcggatctgccgttcgagttctcttggtcgtctcgcttccacaagtctgcgctgctgttcggtggtgacatcaagtacaagcagcgagtgcacaaggaggatgaccagggcaacaagctgtacgccatgtcggacgaggtgcactacctgctcaaggacggcacgtcgaagaccgaggaggagatgaccgattgggattggggcaacgccgagcgcttcgccggtggtgctaagaagggacagcccaagaccaagaaggtcaaggtgcccgaccttgccaagcccaagatgacgaccgaggatttctactacaagttccccggattcgttgagccgctcaagtcctgggcgagcagcacggatggcgtgtactccacggcgagcgaggtcatcgaggcgctgggtacgtgggaagatgcgccgcccttcatcaaggactacgccaagcaggcgaagatcgcgaaggatctatcgacttactactgggtcgaggacgaggacggcaaccgcaagggcatgctcgcattgctcgggccggacggtatcatccaccaccagctcaacatggtgaacacggtgacggcgcgcttgtcatcgagcgatccgaacttgcagaacattccgaagggtgacaagtccgacgttaagacagtgttcgtctcccgcttcgagggcggcagcatcgtgcagtcggacttcacctcgctcgaagtgtatgtgcaggcgaacctgtcgctcgacaagaacctgatcgccgacctcaagaccggcatggacatgcactgcgtgcgtgtggctcaggctcacaagatggactaccagtatgtgctggaacgtgcgaaggatgaacaccaccccgagcacaagaagttcaaggcgctgcgcaacaaggcgaagaacttctcgttccagcgtgcgtatggtgcaggggctgcggcaatcgcagcagccacaggcatgacggtcgaggaagtcaaggcactgatcgaggcagaggagacgcggtaccctggtatcgtgcgctacaacgacagcaacttgcgcatgctcgaacgcaatcgcaagccgtcgtctctgttcgtgcagcacgacgaggttcgcggactgactgtcaacctcggcaagtcctacctcaccacgcctgacggcaagcgctacgtgctgtgggaatcctgctctccgaagttcgtgtatgagcgcgaaggcaagacggccacgttcaagccaaccacgttgaagaactacccggtacagggcatgggtggtgagtgggccaaggctgcgatgtggctgctggtgcgtgcgttctacgagcaggacaactacggcggcaaggcgctgctggtcaatcaggtgcacgacgcagtgtatgctgacgtagcggaggacgtacgcatcgacgctatggccctcatacatgcgtgtatggaggaggcgagtgtgctgatggagcagcacttcgactggaagatcgccgtgcctgtgcccactgagacggtatacggcacgagcatggcagaggaacatggcgagcctgccatgcgtgaattggtacacgtacaccggaagcacattcggtcacgttacctgaaagattacatcccatcatttgaacaggagaagaattgacatggcactcaacgcagcaatgaaggcacgcttggcgaaggcgaagcaggtcggcccgaacatgaacgaggcgcagcagggcggtggttcgtacaccccacccgctgagggcgttacccgcttgcgactcgtcgggtacttcgaggtcggcgaacacacggagcagtccggcaagttcatcggcaagaagaacaagaaggtgcagctggtgtgggagctgagcggcaagaaccacgagccgaccgaacacgatggcaagaagatcccggtgcgtatgacgcaggatctgaactactcgctcaacgagaaggcgtcgttctacaagctgttcgtggaactcaacgcgtgccacggcaacgaggccaccatcttcgccgagctgctgggcaaggaattcctgggcaccgtggtgcacaccaccaagggcgagggcgcagccaagcgcacgtacgccaacctcaccaagatccgcaaggccgtgcgcttggacgaggacgacaacgaggtgccgatcaaggttgacgagccgatcaccgagccgaagttcttcgtgtgggacatcgccacgatggaagactgggacgcgctgttcatcgacggcgagtacccggagcgtaaggatgcggcgggcaacgtgacgcacaaggcgcgcagcaagaacgtgttgcaggagaagatccgcagcgcgaacaacttcgactccctgcccatcgccgagttcattcgtgctggtgtcagcgccgaggacgaggcggacatggacgatgcgctgggcggcgacgacaatggcgatgacatcccggacgacgagtcgcagcaggagcagcgcgaagtcccggcaggtcaggccgacgttgacgatctggtctaagccatgactactgcggccgagcgtttgaaagaacacgcccgtaacgcaccgatgccgggcaccactgcccggccttcggtcgagggcatgccactccacatcgacggcgactacgccgcctactactgcgcaggcaacgacgagacatcgccgggcgtagctcgcgagaacctgctgacccgcatcgagcgcgcgaagcaggtgtccggtgccacccgtgccatcgtgcacctttcggaccgagcgtgcgacaagggcctgcgcttcttcatcgcacagtccaagccgtaccagggtcagcgcaacacggggcgcaagccccagaactgggactacctgcgcgagtacatggagacgtacgacggtactgcgttcgaggtcaagaactggtgcgaccgcgaggccgacgacggcatggcctacgtgtccgaagcggcgtacaagatcggcaggcccggtgcggtactcactgcggacaaggacatgcggatgttcgcaggtctgcacatagtgtggaagaccttcgagatggtggaggttctgcctggcacgtacgacctaatgcacgacggcaagcagtacgggcacaagtggttctggactcagatgcttcaaggcgacaccgctgacaacatcatgggcctgccgcgtgtcggtgaggttgccgctgtcaaggtgctgggcggtacgaagtcaaacgccgatgctttcccgctggttctggacatgtacaagtccaagatgggcgacgcatatgccgaccactttgtggagcaggctgcgctgctgtggatgcggaccgacaagcaggccaacgtcctcaacttcatggacctactcgcgggcggttaccctgcgaagccgtggtccgaggtctggggcgcagacgtggtgcgcgcagccaagcgcatgtaccaccgtgtgatggaggaacgcgatgctctctacgcctcgaaggcttaaagcatccgaggttgcaactgtgcgtgcccgcattgccgctgagcagggcgggcgctgcaagttgtgccaaggaaagctgggcttgaaagccccactcgatccggttctggatcatgaccactcaaccggtgccctgcgtggcgtactgcacagggggtgcaactccctgttgggtaaggtcgagaacaacgcaggtcgctacggtgtgtactcactgttcgcgttctgtcacggactcgcaccgtacctgcaagcgcacggtaccaacataactggtctggtccacccaaccttcaagacgcctgacgagaaacgtctcgctcgcaacgcgaaggcacggaaggctagggccgcaaccaagaaggaacccgcatgaaagtcacattgaaacaactgctcaagcgcgcaccgaagaccggaccgaagatcatctgcctcgacatcgagacattccccatcgagttctggggttggcagatgttcaacaacaacttcggcgttccgcagatcaagcgggactggtcgctgatgtcgttctccgctgaatggctggacgacgacggcaacttctacatcgaccagcgcaaagagaaggacgtgttcgatgaccgcaagcaggcgcaggccctgtgggaaatcctcaacgctgccgacttcatcctcgcacgcaacggcaagaagttcgaccttcgcaagatcaaggcgcgcatggtcatcctcggtttgccgccgctgtcgcctatcggtgtgatcgatccgatgctgctcaaccgcgtggagttcgcgttcacctcgcacaagctggagtacaccaccggcgtgctggtgcctgagctgcgcaagtacaaccacaagaacttccccggcttcgagctgtggatcgcatgcatgcaaagcctgcctggtgcgtgggatgagtgcgaggcatacaaccgcgttgacgtgtccggcatgaaggccgagtacctcaaggtgcgcggctggtactcgcagcatccgaacctcgccgtgtactacaagggcgacggcaccctgcaccgctgcaacaagtgcggccacgacgagatgatcccgcaggacaagcctgcgtacactcaggtcggcacctacctgctgctgcaatgcacgcagtgcggcggacatagccgcgcgcgtcgcctcaccaccaccatcgaacagcgcaagcacgtcaccgtgcccgcctaacaggagaactacatgagccgctttctcgaagcataccgcgttcaggtcgtaacacccaaggacgtggagaacggcgcaaccaagggaggcatcctgtggatgcacagtgaggtggaaggtagccccggctacttctacttcatcgactctccggactccgaccagggcattcccctggcggcagcacaggttgtgcgcgacgaagactgcaagcgctacgaccgctacctgatcgagaagcccgagaacgcgggtaccgaaacgctctcgacaccggcccccgaattggtacacgtcagcacgccggagcctacgcttacggagaacccgtacgccgacttcggtgccgaccatagcgtggggccggtcacgctccacgcaccacctgcatctcgtggtggcggcttgaagttcgacgccggtaaggtccgcccgtcgctactcatcaacggcatgccgcgtgcgctgctgcgtgtcgccgacgtgctgacgttcggtgcgcagaagtacgaggcccactcgtggaagaaggtggagaatggcgaggagcgctacaacgacgcaaagctgcgccacatgttcgccgaggccctgggtgacaaccaagatcctgagtccatgatcgagcatctggcccacgaaatttgcaacggcctgttcctgctggaaaaattcctgatcgccaaggagaacgcacattgagtaactccaccaaagacgcagcccgcctgctcaagtacaccaaccagcgcgttgtgctgggagatgagatggatgacgcggtgacatacgccatctcccaggtcttcgtccgcgcttccgaggatgcgcaggcggacatctatgcagccgtccgcgagtgcttcgatgagtacccgaatggcaccagccgcaagatcgcagtggtggacaagctgcgtaagtaccagctgagcaggatctatggctaagcaatcgaaggctcgcagcgtcaaggaagcaggtgtcaacatcctgatcgggtactcgataaactactccgcgaatatagcgctgctccctgtgttgtgggacaaggaccacccgttcctgagcgcacatgctgtaggcatcaccttcacactgatcagcttcgtgcgtcagtacatcatccgtcgttggttcagcaaaggagactgacatggcaaagaccaagtacatcacccacaccgcatgcgagttggagaaggtgccgaaggctgcgaagatcggcgaggccatcgccttctacctcgtgcagttgaagtacgacggaatctgcggcgtgctgatttacctcggcccggatcagtggtgcttccgcacacgtaccggcgaggcggtcaacaacttcaaccacatcggcgaagcgttcgcatctctgccgttcgatgtgttggccgaacaggttgcgagtacgttcgaggccgacgagggcgaagtgcttcccgatcagatgaagcgcggcgtgtacatcggcgagttctggcacccggactttgcagcgtccacggtcagcgggttcaataacctgacggacccggccaagatcgccgccgcccaatccgacatccgcaaggtgcagttcgttgtttgcgacttcgttacccacggggagtacatggcggggcgcagcgacgtgggctttgctgaccgcatcggccgcatcgcctggatgcagggaatctaccatcccgacgacggtggtgtgctgggcaagaatgtgcagccgcctgccccgcccatctggttcgccggtcacgagggctacttcaacgagcaggccgcgacggacgtgtacgccctggccgacgaggccgtggcttccggccgctacgacggcatcatcttgcgtaacgagaacggcccctggattcagggtgcgcgcgatgaacacgtggtcaaggtcaagcccttcatcacccgcgacctgctggtcgtggatgtggaagaaggcaagggcaagtacaagggaatgctcggcaacctgatcgtgtcgtacaagggcaaccgcatgggcctgtctggcatgtcggacgctgagcgccgcgagtggtgggcgaaccccgcgaccatcatcggccagatcgttgaggtcaaggccatgagtgagagcgtcaagggagtgctgcgcgagccgcgcttcaagggcatccgctacgacaccgaggtggattcatgagtgacgtgcacgtcgcaatccaccacgtgctcgaagaccagaccatccgagtgatgatcacaatcccgttccatgagtacgggcaatcgctgttccccaaccagtacctcaaagacaagatcaacgaggcggtggagcagattatggacgaagcacgcaaccggagataacatgcagacgcagctggaactggaagaagagatgtacgcctacggacgtgtccggatggcagacagcattgccgccaacgaagagaaggggcgcgcagaagcaaacccttacgctcagaagttgtaccgcaccttcctgttcccactgcgtgacgtgcttgtctccgagctatcggagaagaagccgggccgcaggcaggcgcatgcggctctgctggatgggatggacatggatgccgttgcgtaccttgcggtgcgcagcgcactgagcagcgcgatgcaggacattagcgtccgtgctgtggctatccaagtaggcaaagcagtgtaccacgagtacctgctgtgccagtttgaagacaagaatccgaagttgttccactacctactcaacgacatcgaccgccgcatgtcttcggacgagcggtacaagatgaacgtcatgcgcaaccaggccacgaaggcaggagtcgagttcaaggagtggggcaacgcacacgtgcagcaggtcggctactacctcatcgacaagatggtgcaggtcggcatgttcgacgtgacgaacaacagagagggcgcgctgaaccacgtcgagcttaacctgacggcagcagccgaggccatcgtgtctcagatcaccgagttcgtaaccgagatggcaccgtactggacaccgtgcgttgagccgccgaaggactggacatcgatcgatgagggcggctaccacaccgagggcatgcgtcgccttgatccctacctcgtgcacacgcacggcactgctcgacgcttcttcgagatggcggacatgagcaaggagctgcgctgcgtcaatgcattgcagcgtacggcgtggcgcgtcaaccgcgacctgctcgacatcgcgaccaacgtgtcgtatcacttcgacatggaagagatcatgatgcaggcggatacgccgaagccgcagcgtccgacgtggctcaccgatcagaaggtcgatgagatggacgaggtgcagctcaagtcgttccgtgcatggaagcgcgagatggcatcgtggcacaccgacaacaagctgcgtaagctcaagggctaccgcttctcgaacgtcatgaaggaggcgcgcaagttcgctgagtatcctgaaatattttttgtctacttcatggacttccgtggtcgcaagtacgtcaagtccaacggcattagcccgcagggttctgacttgcagaaggcgatgcttgagttcagcgtcggcaagcccctgctcacgcagggtgccaaggactggttcatgatcacgggagcgaaccgcttcggtgtggacaaggtagactataaggatcgaatcaaatgggtactggacaacgagcatctgattctggattgggcacgcaacccggtggactcgccggactggatgaacgccgacaagccgtttcaattccttgcgtggtgtttggagtattccaagtggcgggcattcggggacaagttcctaagccggatcagcgtaggaatggatggctcgtgcaacggcttacaaaacttctccgccatgcttcgcgatcctatcggcggaaaggcagtgaacttactcccgtccttgctgccaaacgacatctatcagatggttgcggaccgtgctatgcagctgttgcaggtttccgaggacgactcgccattccgcactatgtggattgcgcacgtgttaacgcggagcctggtgaagcgatctgttatgaccctcccgtacggctcgaagcgtacttcgtgtaaggacttcatcatccaagactacctcaaggctgggaagttcaaggagttggacccgaaggactacgagaaggccgcagcgtacctgagctacaaggtatgggaagcaatcggcgatgtggtcgtgaaggcgcgcgaggcgatggattggttgcagcagtccgcacgtgcgatcatcaaggcgggcgacgagaacatccgctggatcactccgacggggttcccggttgtgcaggtgtacttcggcacggtcgagcatcgcatcaacaccaagctcgcgggcaacatgaagatcaaggtgctgacggagagcgacgaggccaacctcaaccgccacaagaacggcatcgcgccgaacttcgtgcactccctggacgcatcgcacctgacgggcaccacgctgcgctgtgtggacgagggcatgaccgccttccacatggtgcacgacgactacggcacccacgcagcggacgccccagcgatgtacacggcgatccggcaggtgttcgtggacatgtaccagcagcacgacatgctccaagagctgcgtgatgcctacgtgatcctgtccgcaccgcccgagcagggcaccctggacctgacgcaagttcttgattcgccttactttttcgggtgaggttagtttcagtacacgtacaacagatagaccggctccccggctcgtgcttcggcatgggtcggggagctttcggccgtccgcattttggtacacgtacaacacaggagaaaccatgtctctcatttcagtacccgtcccggcagagaacctgtcggcggaagcgatcaagaagatcgaagccaagctgggtggtatggcgaacccgcagatcaatagtggcaccacgcaccttgaggctgggcagaagctgggcgtacagttggtgctgcgaatccttcgcgatggttggcacaatcagtaacttagcgcatctctgcatctgtctttaggtaccattagttagcttacataggagatagatacatgggattgagtagcctttggggcggaggtgatgcgaagcgagcagcaaagatgcaagccgacgctatcaaagcacagactgctgcgactgtacaacaggcaggtctggctgctgagcaagccgctaatcagattcgcaatacgatgcttaccgagactgctacgcagtatgcgaagactctcctcggtcggccaatggaacaggtcagcgtacgtctcgctccgcaagagcagatttctacgactgatcgcacccaacgtcagcgttctgtccgagacacttacatgtccggtggatcgtggttcacgtgaggagtaaccaatgaatcacttagtcaatacggctggtgcccgctgggctaagctggacggtgttcgtggtaacatcatccgtcgagccgaacgcttcgcaaagtggactatctccaaggtcttcccggacgatagctacaaccagaacaacgaggccctcagcaatgagtggcaatcccttggtgcgcaggcagtgaaccatctcagcaacaagctggtgatgaacctgtttgctccatctcgtcccttcttccgccttggtcctaagaaagccgccaaggaacaaatggctaccattgcagcggaacagaagcgggctatggagaataagctgtcggtggtcgagcgcgaaagctccgacgtaatcgaccggctcgcactccgcgctaagctgtacgaactgctcaagctcctgatcatcaccggcaatgcgctgatggttctcaaggacaagagcatgcgcgtgctgactatgcgcaactatgtggtgcgccgcgatgtcaatggctcgatcatcgagatgttgattcgcgagaaggtgcacaagtcggagatggatcaggatgcgctgacgatggcgttgcgctccggccagttctctcttgacagcgagggctgcgcccatcacttccgatggatcacgttcgacagcggcaagtttcgtgaggatcagtggtacaacgacttcaagctaccggcggactactcctcaagctacaccaaggagcgtatgccgtaccatgctgtgacgtgggacctgacatcgggtaaccactacggtactggcttggtcgaagactacaagaacgacttcgcttgcttgaccgcgctgtcgcaatcgactgtgttggctgcgatcatgaactccgagttccgctgggtcatccgcgcaggcgcaatgacttcggctcaggacttggcgaacagccgcaacggcgacgtgctgtacggtgagcagggtgacatcactccgctgccttccggcatggaagccaagatcgaagcgaacatcaacatcgcacagcagtacgtgcaacgtctcggcgctgcgttcctcttgcagtctgcgatcactcgacaggctgagcgcgtaactgcgcaagagctgcggatgaacgcggaggagttggagggcggcctgggtggcgcttactcccgactggctggtggcttgcaggttccgcttgcggacttctgcctggactacgccggttactccgtcaacgagacgaacttcgaggctaccgtcatcaccggccttgcggccctgtcccgtgtgggcgaccgcgaccgtctgatggagtacctgcaatcgctcgcagcggctgcggggcttccgccgatgatgctacagcgaatgaagatcagcgtcctgatgtccgaccttgcatctgctgtcggtctggatcgcgacacctacgtctacaccgatgaggagttcgcacagatgcagcagcaacaggcccaacagcaacaacagcagatggccgtacaggccgctgtccaacaggagacacgagcatgaccgatgaagtaaagaccaccgttacccccgcagtgacggaagtgccgaccccaacacccacgcccacgccgacccccgcacccgagaagaccgaaccggtcgataagggtactccgtattcggcgaacaccggctcccgtcagctggatgttgcgttgggtttcttcgtcaaccacctgggccttagcccggagtccccggaagttgtggaagcacagcgcaccggtaacttcgagtacctcaagggccatgcggcacagaagggcatcgcttccgaactcctcgatccttacattgcgctcgccgaaggtggccgcactgagctgaccaagggtgcggaggcgaagcaggcggaactcgcgaaggagctggacgagtatgccggtggtaccgagcagcgagtggcaaccttggctttcgtcaaggcaaactccaccgacgagcagttggcagagttcgatgaaatcctcaaccgtggtggtatcggtgcgcaggcgctgatgtatctgttcaagtccaagatgcaggccgatccctcggtcagcgtgcagggcaaggacgcggttgtccccaatgcaggcgcgcaggttccggcgcaggcgactcagtacgcgagcaaagaagactggcgtgctgcgcagcgtgctttgatcagcaagtatggcatcactggctatcagaccactccggaaggcaaggcacttgcggccgcgttccccggttaatcgttccaccaacaacaactagaaaggagctttatacatgagcaacatttggggtcccaccaatccggttaaccagaaccaggccctcggcgctggtccgctggatgcgttgcagcaggagcagttcaccggcgaagtggaacatgcctacatggcaaccaccgtgttcgagccgcacttcaagcgcaagatggtcgtcaagggtaccaacaccctgaccaagaaggccatcggccgctcgaccttgcagcgtctgggtcgtggtcaggcaccggacggcaagcaggttaagttctcgaaggcgcaggtgaccgtcgataccatgctgctgtcgcgccacaccttcgatgagctggaaaccatccagaccgacatcgacgcacgtgccgaagtctcgacgcaggcaggccgagacatcgcggacttctacgaccagaccatcgccatctcggcggtgaaggctgcgcgctacaccgcgaacccgtacggcctgggcgaagccgatggcttctacggcgctaccatccagaccctcgcagcgggcgacgagctggacccggccaagctgtaccacggcctgggccagatgctgatgaagatggaggagaagaacgtcaacccgcgcagcgagaaggtgctgttggctgttcgtccggcgcagtactacgcgctgctggacgcggagcagatcatcaacggcgagtacatcacctcgtccggcacgaagatcgacaacgctccgatgttcaaggcatggggcatcccggtcatctcgaccaacaacctgccgaagggcgtggtcaccggccacctgctgtccaacgaggacaacgacaacttctacgacggcgacttccgcaacgtcgtggctgtggctgtcggcccgaaggccctgatgatcggcgagtccaagccgctccagaccaagatctggtactcggatgagtccaaggtctgggtggtggatgcctggttctcgttcggcatcgcgccggatcgtgtcgagcatgcggctgtcttgcagaccgcgtaatccaactgggcgcagtgctaccataggctgcgcccgactcaattaggaggccacatggcaaccattgctgcaaagattcccttcgctcccggcacctacgtgcagctgtccgcagctgtcgatgtgtacccggacaagacgcaggcttacgtctgcttctaccagatcatcggcaccaccctgtacgtgcaggtgcgcgtgaacgatgattcccccgacctcggcacgttcgacctgttcattccggtgagcggcatcgaggccctgggcacgccgtaagaacacgccacgctctctaactgagggcggggcattattggtccaaggaggattcaatgtttatcagcaagctcgacgttgttaacgacgcgctgtcgtgcctcggcgaagcgggcctgactgacctacaggaagaccacgcttatcgcgatatgatcctcggcttcctgaaagctgagacggatcgcatctgcgcgcgcggctggtggttcaatcaggagtacacccgcctgctgcccgatgcgaactcgcgctacgtgtacgtccccgaggacgtgtactcggtggtgaccccggcgaccgggttccaagtaacgcagatgggtcgtcgtatgtacgactcgcgcaaccgcacctacgagtgggacaagccgattcctgttcgccttacgcgcatgttccccttcgaggacttgccgtacattgcgaccgaggcgatccgcgatgctaccaccgtgaagttccaaggccgcatcgactccgaccgcgagacgaaggccgacgccatgcgtactgcatcgctgtcgatggagcagctggtgcgccttgacgcacagaatcagaagcacaacatgctctaccggaatggtatggagcgcaatgcatggatcgcaacgaaccagcagtacccatcgggcgagcgagacatcctcggccctaacatcatcgttcactaggaggcatcatgagcaagaccgtaggcagcttgccatcgctggtgcagggcgtatcggagcaggaaccgcacaaccgtgcgccgggtcagatgtgggagagcgtcaacatgattgactccccgaccaagggcaaggctcgtcggcgaggcaccgtctactccgaccacatcgagctgccctcggccattaccgctgcactggttgaggcgcgctcgcagaccgagtacaccttcatcatcgacgggcgagaatacagcttgatctaccgcagccgcgcatcgacgctcggcaaggactacttcgcacagctgctggacaaggagtccgggcagttcttcgacatcgtatacgagggttcgacgtggatcgacaacctaatctccggcggcgtgtctgccattgcgtgcatcgggcggtatgtctacattgcgggcaacacgacattgccacgcgcaacgtctaccgaatcctggaactcgcccgacaatttgcagaagctcgcggcatgggttcgcgagggggcgtacagccggaagttcacgctggtgctgtaccacgtcaacggaaccaaggtcgagttcgcgtacacgacattggccgctgcgtaccctgagctgctggacacgacggacatcccgttctacaagccgggcagcaatccgcagacggcggacccggagtaccagaagcgagtcaacgaccgagtgaatgcgtacgagggcgagaagaccgcctggattcgcaaggcggcagaggacattgtgcccgcgaacatagcagccaagctcgctgagttggcggcgcaggcgggcatcatcgcttcctcgattggcccgtgcgttgtcgtggacgatccgaactacaacgacatccgcctgttggacgacgcgagcaacacgctggtctcctacgctgggcgcgaggtcagcgatccgcagttcgttacgctgtaccattgggcaggcaagatcgtgcgcgtgcgcccgtcaggtggtggcgacaaggagagctactacctcaaggccgtggcactcgaagagggcgctgttggctggaccaaggtggagtgggtggagactgccggtgtggtgcacgaaattcacaacgtcgtgtcccagatggtaatcgatcctgcgttgaagactgcgtatatcgcacagaacggcgagggcttgaagtccctggcaccacagctcggagaccacccggtctacaagccgaacgtggtaggcgatgcggtcacggctccgctgccgcactacttcggtcgagtgatcacctgcatgaccgtgttccaagatcgactcatgatcagcgcggacaacatcgtgaacttctcgcggtcgtcggactacctgaacttcttccgtgttaccatcttgaacatccaagacaacgaccccatcgagattttcgctcacgggtccgagggtgacacgatcaagcgggcggtgatgttcgagcgggacctcgtgctgttcggcgagctgcggcagtacgcgatcaacgggcgcgagttcctgtcgccgacgaacccgaacatcaacgtgatcgggaacttcgagggcggcgtgcgcgcgcagcctatcgcctcggggaacttcctgttcttcggcaagcatgcgaacgagcggacgggcctgcaccagatgcagccgggcgagacggcacagacgaccatcgtgtacgacgtgtcccaggttctcgacacgtggctgacgggcgagcctgtgcagcttctgggcaccaccatgccgaacatgatcacgtaccgcacggatgcggacccgtcgatttggtacacgtaccggtacgcagacgagcaaggcactggccgcgttatggcaagttggggaaagcagcagtatgctcccgagcttggcaccgttgcggctatcacgcactaccgtggcgacctgttcgtaatcacgctgcgctcggcaggaggcaaggactactggttcgccgacaagctgagtctcaacgtggacatgccgcgctatccgcatctggactcccaggtacggtacggtcaggagaccccgtggcacacggcagcagccagtaagctgtacgttgctgctgacaagtcctcggactacttcctgttgggcgcgccacgcgccggtgccgctgagtttgtggagcaggcgccgggtgtggagtccgcacttgtcgttggctccatcagccctgcgtacttccagccgacgaacccgtacatgcgggacagccagggcttgccgatcctcaacggtcggatcaccctgacatcgttcggcttccacctcgccgacactggcgggctgcgggcatacgtgttgaagccggatcgcgagcggaccttgctgttcgagggccgtgtgatcggacacagcagcaacatcatcgggcgacagccggtcttctccggcatccgcaccgtaagcgtaggccgcgagacgcggacctgcatcattgaactgcggtcggaagactggcaaccgcttcgcgtcactggcgctgagtggtccggccaggtattcatgccgcgcgcacgagggctatactgatgagcggtagtatcggtactatgctgcaagcgaacaacatcacccgcgtggcacgtgcgaagtaccaatccgccgttgccacgcaggccgcgaacaacaagttgaagaaggcacaaggggacctggctaactggtcacggtccctgagcaatcgtcggcgaattgaagcagcggagcaggagttcaacagcggcgctgagcagatcagcaacgagacacgtcaggctgggaagcagacgacgagcaacagcttgcaggcagcggagcagcggggcgcactactggcccgtgctgcgatgaccggtgtaggtggctccaccgtggaagcgatggagaacctcatcggactacaggctgcgacgactcaggaagagttggatcaggcagtggacaacatgcagtacagcggtaagcgcaatctcactactgccatgatgaacagctacatgatgcaggacttctcgcagacgatgatggacttcgacttcactcaacacatcgagccgaaggcaatgaagggtcgtgtcgcgaagctcatcggtgtggctgtggctacctacttcggtggtccgatggcaggcgaggcagctgctgacttcgctgtcggcgaatggcaggcggagaacggggacttccaaggtgcaaaccagtccttcggttcgtccatgaccaacgcgggtgcagcgtggaagcagtacagcgaccgcgatggaggctcgtggggcggagacgtgatccgtggcatgcgtgcaactggcaccagcactgacgctgcccgcacgacgggcggtgtatcaacgaagaaggcgcagtccgcatccagcggcagcaagtcttggttcaaataacaggaggcaacaatggcaggtattcagtttaaccccgtcggtggtctgcaaggcggggccagtggtggaggtgctgcggtgcctacccttggcatctctggcggcggcggggcgagcagcaacacgccaatgcgcagcggcaaggattggttcgacaacggcatgcgtgcggacttcggcggtaacatgccggagttcctcaacgacgtgttcgctgcgccgctcgctgtggcaaagcaggagcgcgagtggcagggctacatggatgcagctgcgggtacaaccgcagaagagattcgcgagacgaagccgtggtacaccaagctgttcgggccgactcagtacgagtccggcgcgattgcattcgagaatcagaagaaggcttcggatctgatccgcgactggaccctgcgtatgccggagctgcgcaagctgcccgccgagcaggtatccacgcagctgcgcgagcagatgaacagcatgatgtcggactccccgttcgccaatgctgtcttgcagaagagtctactgactcagttcgcaccactgctagagcagcatggtaaggagcgcatcgcttggcaacaggcggggctgctcaagatgcagacggagaacttccagtccaactcgtccacgtaccagctgctgatgtcgaaggctgcgtcgctcggtactgactctcctatggacatcaacaccgccaagcagttggaggcgtccaagtccgccctgttcgatgcgctgaccaccggcaggttgcagaacgacgatagcgtcaagtccttcatcatgacgggcctgcgctccgcaatgcgcaacggcgagttctacacggtcgaggcaatgatggatgagggcgtgctgtcctcgctgccaatcgaaactgctgagcagatcgagaaggcttacatcacggccaagtcgcagtacaagaaccgcttcactgcggacaacccggacttcgagaagatgatggcgaaggccaccgcgtcccgccacctgggcatcggcggcgagcctatgcttgcgcagctgcgggaaatcaacagcacgtactccgcgctgactggtgactccagcgggttctacgactccgagcagatggctgcgtacgccggtgatgcaacgtcgtcgtggctgcgtcggttcgagcggcaggaggataagcgggaacggcagcaggacaagcaggatcgactcaacgagaaggcagcagacgaggcggcgaaggctgaggtcgaggcgcgcaacacggcgcagctgcaagagttcttcgtcagcggctcccttggcgaggccatcaacatgaagaacgtggagaagggcgatgcagatcgtgcctcgaccgcgcgcttctctctgctgatgggcgagaacaaggtggaccaggcgatgggcaacctcgtgtacaacttcaacaacacgaagggcacgtacaagaacgatcagctctcggcgcagttgcaggccaacttgcagaacagcatggacgagcaggtgagtgatgcgttcctcgcacagcacgcgcagtggaaagcgctgtacagctcaccaggatacgccctgcagaatggtgaggtgcagctgacggacgcggcgcagggccaggccactgccatcggctactacggcgagactctcaatcgcaagatgaaggagttcgatgagaagtacagcaccggcagcatgactgctgaccgcgcttacgctacgaccttcgggccgtgggtggcagcgggtcgtccggacttccgtggtatcgaacgcagcgagcagaaggaagcgaccaaggcattcctcggagcaatccgtgggcagtccgcaggtatgttctcccgcatgttcggcaatgggttcgctttgcatccgtccgcccaggcgcagttggcacaggcggtcggtccgtactacgagcagctcgatgccggtctgttgccggagcagcgcgccaaggctgcgatgaatctggcgaaggcgggcggccgtatcgagattgtggcggggcagttcctgcactggaatcggaatcagcagccgctgactaagtacctcaacgatcccgatggcgagcgtacctcggtgctgttcgacgcagttctcaacgagcggttgaagtccgtgggcacgaagactgagggcaactccgtcgtcatcaatcgcctggccgacgagaagggcgatcccgtgtacgctgtgcacgtggagacggacgacgggttctacaacgtggacatccgaggctccgacctgagtaactacgatgaggccaaggcacgcgcactgcgagccaagatggaggcaccgaagaagccactgaacatcggcttccagctgcccgcagagaccgacaagcagttcgagcagtaccacggtatgagccgtgagcagtttgacgcacgcggaaagcgtaaccgtcagcgcatcggcgcggccctcacgggtggcgcagcaggtttgaccactgacgcactgaacaacaactaacaggagaacttatgaacactctcgaccttgcaggtctaacgctggaccagaagtttgaagcagcgggcaagttcgcgggtgttccctcgcagctgttcgcaggtatgtggtcggtggaatcggccaagggcaccaacatgacctcgcgcgcaggtgcgcggggtcacttccagaccatgcccgatacacagaacgcgtgggaagaacgcactggaaagaagttcgacccggacaatttcgatgacagcttgagcatggccgcgatgacgatgcgcgagaacatgggcaagttcaagaccatcccggatgcgctgcgtgcgtacaacgcgggctgggatcgctccaagtggggcaacgaagagacgagtgcgtacgtagggaagattgccaccgagggcggtatggccctggccggtgcaatgaccatgacgtacaacaaggtcaacccgaacggcagtatggacaccgcattcaatggcggcgagttcgatgaggcgctgttcgagaaggcttgggccggtgaggcgctgggcgacatgtcagtcctcaaggcttcggcaatcaagaagcatctgacggacgtggagaagggcaccgcgaacctcgcagctgtgcagacggcagcgatcaacgtgggcgacgccaatgtggtgcagatggcgcacgaggcgcaggccaccgtggagaaagacgctgcgcagaacgtggcagcgtacactgcgaccactggcaagcacaccacggacaccagcacgtccacgatcagcgccaaggaagtgcgtgcgcgtatggatgcggcgcttgagcgcgagcagtacgcacaatcgctgactgtcaacgacaagtggggcgctagcttcggcacaagcctgatggcgggcatgatgcgctatttcgacaacgatgtgggcgactcgtacccgaagggctggtcttacatggacagcgcgtacgagcaagagaagggatactcgatgaaggagcgtgagttcctgcgcgaggccgttaacccgcaggatgtcgagcgtatcaagggtgagatcgaacagcagcgctacgacgccaagctgcttgggcacctgtcggagtcctcgcggtttggttggtccatcgctgccgggttctcggaccctgtgggctgggctgcgggcctgggcgttggtaaggccgcgcagatggcgaaggtcggtgctgcaacgtatgctgctgcgggtcgtccgctgtctgcaatcgccgctggtgcagctgagggcgctgtcggtaacctgatcacgggcgctgcgctcgatgcaatgggcgactaccgcacgatgggggactatatcagtgacgcaggcttcggcttggcgttcggcggtgtgctgtctgcaccgggagccgtgcgcgaggcgcgtatcgcaggcttgcagaagagcatgcacgcacaggcggctatcttggacgcagaactcgctgtgcgtgcgcagcaagctgccggtcccggcgcaactccggaccaactggcgcgtgcgatgcagacaatcgaggagcaggacgacaacgcatggcgtcaggccacgttgggcaacatccccgacgctgaccgcctgatggcgcgcgctgacgtgggcgatacgcccgatcctgctgtgagctacagccgattcagcgatgatggctcccgcaatgcgtacatccagcagcaggcgttcgatcagagcatcgcgggcgacgatatgcgggctatggttgcggagttcagcaagcgaagcgacgatgtggtggcacgctacccgatcgatgaggccaagctcaagacgttcctgtcctacgctgacttcgaggcaacctccaccatcctgctcaacagcaagtccaaccccgcaaaggcgctgggcatcctgattgctgagtctccggagggtgcagcgggtcgtcattcgaccgcatcggtgtcccgcacggcgcacttcgagcagtacatgggcaacatcaaccgcaatacggaccagctgttcgacatgtgggcacgtgagcagggctatggcacgattcgccagacgatggacagcgacatccgcgtgcgcttcaacaaggaagtgcagttggagatgaatcgtcgctggaacaagcagccggagggtgcaatccacccggcagtcaagcgtgcggcggacatctacgaccagggctacaagatcatgggtaaggatcagcgtcacgtcggagttatcggcgcggatgctatcgatctgaacaccaacggctacttccagcgttcgtggaacctgggaatgctgcgcggcatgggtgcatcacagcgcgcggcgttcgtcaacgctctggaagaccagttccgcaccgtcgcgggcttcaccgacagcaaggacttcaacgttcgcgccttggcggtgacctacctcgcacgccttgagcatcgcgcggtcggcatgctcgatgttccggccaatctctactccaacgacgccggtgcaatcgttcgcgatgccctgcactctctggggctgagcaaggatgaggtcgaggcgcagatgaagcgcttcacccgtggtggcgcggggcataccaagtcacggatcgacatggactacggcaagaagtacgacgatggtgcgggcaacagcttcacgctcgtggacttcctcgacaatgacatgaacgggctgtatcgtcggtacgcacagcgcactgccggtgatgttgcactagccaagtacggcatcatgggcgagaacgggatcaaggttgcacgtgagtccatgctgcgcacgggcgctacgcagaaagagctgaatgccttcgaccagctgatggcagagatgaccggtaagcaggtcggcaacggtgacccgctgatcgcacagaacgcccgctccctgacgaacctgtcacggatgggcggcgctgtgttcccgcagatgggtgcgtatcttgacgccgttgtgggtctgggtgcgactcgcgctctgcgtgcagcaggtgcaacgaaccagatgcgcaaggaagtgcaggccctggtgcgcggcgagaaggtgtcaaacccgatcctgtccggccttgaaggcattggtccggagttcggcacggcggactaccgcatcttcggcatcttcgacaccccggagatggcggacatcgctggtaaggagagcgtgggcgtagtcaccaaggctattcgtggtggcgcgaacctgcaacgtgttctctccgggcaccgctgggtcactgctgcgcagacgcgcggcttcgctgaccagattgtgcgcaaggctctgcgcttcatcaaggagggaggcgaggatgtggccctaaaggacatgggcattcagggtgagatggtttctaccttgcaggcgcggttgaagaagatcgccaagttcgatgacaagggtgagttgatgtcgtttgatccgcgcaagctggacgtagacgacatcgcgggtcggcgcgcagtgattgcgttccgggactccatcatgcgtggaacgaaccagatcatcaacaaggagttcccaggtgaagtgggcaagtgggcgcataacgggtggctcaagctgctgtttcagttccgcacgttctcgatggttgcgcagcagaagtcgttcaaccgcatcctgcacacgcagggcgctgcaaagctcaccggcctgctgctgggcggtatggcagtcgccgcaccgatccacatggcgcgtgctgcactgcgtgcttcgctgatgaaggaggaggaccgcaacgagttcctggaaaagcagctgcacccgatggccctgggccgtgccacgatgaactacctcgctgcgatgggcctgtgggccgacgtggtggaggctgggtcgggcctgggcaccggctgggctgatgcgttcgggttcgatatgccggagggcatgcgccccacgggcggtcggaccatgaaggacacggacctgatcggcgggcagttggccccctcgctgggcgtcatcaacgacatcgggcagggcgtgatgggcaagccggacaagctgtggaagtccgcacccttcgcctccctgccgtacatccagcccgttctcatgggcatcgacagcgccctggacgagggcgaataaccgagcaaagctgggccacggacggccctagttttggtacacgtacaacaggaggaaacatggcgaccatcaccgatcccaccttccgcttcgccaccaacgttttcgacgcggacggcacggacaaggtgtacgacattagcttcgcgcttggctacatcgacggtgaatccgttgttgctatgtcaggcgtcgaagatccaaccacgaagctgctgggcgatatgaaggcccacgttgttagcttcacagataccccgcccggcaatcgcatcaaggtcagccctgtgcctgccgctgggcgtaagctcatggtgttccggcagactgacataagcaagctgctggtgcggttccaagatggcaagctccagacggggcgcaatcttgacctgaactccacgcagctgatcatggcaatccaggaaatcctggacggcctgcgcaacaacaaccagatcgtggaacagcagatcggcactatcgttgacctcaaccggatcatcaccgacatttaccgtcaggtgctggaactcttggcgtccggcggtatcgtgtccgttacgcccaaggtctgggcgggcgtgtggtctgcggccgaggacaccctcggagacacggacttcgagattgtgggggcggacgtttcagactccggcttctacgacacgtacatcgagggcgtcggccttgagcctggcacggacttctccgttgcgctggatggcgtgcccaagatccgctttgctcgtggcgactggcccgaaggcacgcgatggttcaccatcctgcgtgggtatgcgaagccgtacaccggcccgcagcccgtcaccacccttgcgtacccgatcatccggagtcaggcatctgcctacttcttggacgttaaggacgcattctcggtggtgttgctcaacaaccaatccgcagtgactgccaccctcaagctcatccccgaggctcccggcaataagatcactacgggcaccttcatcaccctggtacagcgcggcggcgtggtgtcgcttgcgtctgatccgggcgtcaacctgatcctccctggcggcaccgtggcgcgcacccgcgcactcaacagtgctatctcactcacctgcttggacgctgacgcgaacgagtggctagtatccggggacctcgctaagcaggagtagtcaatgcactttcgtctattcgatcgaccgctgatctttgatggtccgctgtcgtcaatgtacatcgacgggcagtacgcggactacgaaccaggcagcgcatacgagggccgtgtacaaatccacggctccgtaggttacaccaaggttgagattcttgagagcaacatcccgccgggcgcgtacgtctacgtggacaacgtgttcaagcaggtagtcgtcaagtggccgcagtacacgctgccggtcgataccttcaccctgcttgagaacggcgacttctcccaaggagacaacggggcgtggagcaacaccggccccaacaacccgttctccatcaaagccgacgacaagggtaaccagtcccttgagttcaagtctggcttcaagggtgggcattactctgagggtccgttcgccccgatcaaggacatcaaccgccagatcactgcaaccggacgcatcgcgcagggcaaaagctcgaagcgcaacctgtggggcggtatcgttctggtcttccacgacaaggatcgaaaccaactgaactacttggaaagcaactgggtaaactccggtggcgactacaaggacgttacggtcacggctgcggccagtgatgtgcgggccaagtttgtgagcgtgcgcgtgcagttcgaccgacgcgggcagaatcaccccggctgggcggacgacatcaagtggaatcactcgtggaccaagggctacaactctgacgagcagctcatggtgcgcgttcgtgtgaccgacgctctgggcaacacagccgaacacacaggttacatcgaagagaagagcaactggtacttcggaaagctcaacggcctgtacgtttacgacagcctggacatctccggaacaccaatctcgtggcgtccattcggcgctccaatcatgcctcccgagaacttcggaattggcgcatcggttgtggcattcgccacccgcgcgttcgtttcaaagagcagctatgcactcgatcaggtaggcattgcagcaggcgttcaagcgttcaagttgaacaatgttgctcgtcgcgccgaagcgcttcctgaaagcatgtccatcgcaagccgtgtgcgctcgttctctagtaagacgcacgttgcgtatgatcgcgcacgtcccgaactcatcaacatcaccgcagcggtgaaaggattcgttacccgatgaagattaagctaggcgccaaggggcgctttaaggtgcaggtcctgcgcgccgatgggtctgtccgactggaccggccctggcaggacaacctgatcacgaactacggtatggagtacatgaccggaaagtatcgcgatactatgggcggaagcaacctcatggactactgccgtgtaggcactggcaccactccaccggccaacggtgacgtggccctggtgtctcaggtcgggtacatgcctgccaacggagcatacagcagcatcgctccggtctccacttcgtctactccgtacgcaggctaccgggcagtgtacacgttcagccgtggtgcggttgttggtaacctgaccgagcttggtctgtcgttcctgacgaccggcagcaacctgtgcacccgtgcattgttcctcgacaccaacggtcagccggtcaccattgtggttgccgcagatgagcagctcatcatcacctacgagatgcggctgtacatccccactgttgcgaccagctcgacggtcaccgatcccacaaccaatgtgcagtacacgattcgggcactcccggtcaacgctgttaactgggtgtggatcaactacctgctgggcggtcagctcggtgcgagcaacggatcaacgttgagcaacatcactacctacgcctactacggtagcgacgctgcaatccggcagtggcacaacacgccgctagggactgagacatacggcggcgccgactaccagaacgtgccggtaaatgacggcacgtactcacgcgatgccgtcatcaccatccgactcgaaaccttcaacggcatcgatgtcaaggtgctacgcttctcggagtcctcgccctcgtactttgcgccgctcaactggcaattggagttcagcccaacctggcgcaagacgaatgaccagaccatctcgcttactctccgcctggagattgcgcgccgatgatcccagaactgaccctagctaaggcgcgagccgggtgggcgcaggtaatgggcagtcggtcaaagcccctgatcaactacgcggtcgggggtccgacgcttggagacggtgcagaaatcgcaggcaccacatgggttgtggagtacgtggacccagaagtccgcgtctacaagcaagagtcgccggaggaatactccgtggctcttagcctgcccggcattaccttcgtcagcctggcctttgaccagagcatgcgatgggctgtcggcttcactcatgaggacaagggcaagctgctgtggtacgactccattgcagcaggctacactgtacttgaagtcgcaggggctgtaaagcccttcgtggctctcgacgtgcgggacctcgtgtacgtcggcgtgagcgacatcatcgtttcatacatgcgcggcaccagcatctacacccgagtgcagcgggagcggtttcagactgagcgcttgctcaaggctgatgccggaagctccctgtctcgcttcggcctatccgtggtaaatcgcctgcaatggcaggtcatgccctaaaggagcaagaatgaaacttcccgtcagcgtggaactcgcagctgcaaccccgttgacgggtctgtctctgtttgcatcgtggatgactgcgtactcttcggtcatcatcacgaccctcgccatcgtagccttcgctgcgcagatggtgtggcgctacatcgaacaccgcgcgatcatgcgcaagaactcaggaggaaccaatggctaagaatgccgcagcagaaggtgccctcggcaccctacacaacacactcgccacagtgttgaccgccgcaatcacggcggagggcggtgcacccgcagcgatcctcgcggtcgcggcgaagttcttgaaggacaacgacatcacttgcgctgccgacaaggacaacgcgatgggtgagctgaccgaagcaatggaagcggcgcgtgcgccggtgagcgaaagggacaagcaccaggcgcttgagggcgtgctggacttggcgcagtatcgcgccggtaatcggtgagtaccgacaactcttggcgcgctgagcagctcgcccacttgcagagggagtacgtctccttcgcggtgttccttcgcgacatcatgtggttcctcggcggctggactccgacgtggatgcagtacgacatggcgaactacttgcagcacgggccgtcggacctcatggtccaggcgcagcgcggcgaggccaagtccacgatcacggcaatcttcgctgtgtggtgcatcatgatgaatcccaagttccgtgtgctgatcgtatcggcaggcggcaagcaggcaaacgagattgcaaacctcgtgacgaagatcatcctgttttgggagccgttgaagtgcatccggcctgacaagtccgcaggcgaccgtacgtccgtcgaggcattcgacgtgcacttctcgctcaagggcgtggacaagtccccgtctgtggcgtgcatcggcatcaccggcaacctgcctggtaagcgagctgatcttctgatcgcagacgacatcgagtccccgaagaactccatgactgcgggcaaccgcgagatgctgctgactctgagccttgagttctcggctatcgcatctggtcagcccggcattccgccgcgcatcgtgtaccttggtacgccgcagacgagcgagtccatctacaacaccctaccgggtcgtgggttcgacgttcgcatttggcctgggcgcttcccaacgcagaaggagatggacaactacggcccgcacctcgcaccgcagatccgcaatgccatcgaggcagagccgagcttgcagtacggcggcggcatggcgggtgacatgggcaagcccaccgatccgaccatgttcgatgaggagacgttgcagaagaagtaccaggatcgtggggcatcgagcttccagctcaactacatgcttaacacgaagctcatggactcccttcgcttcccgttgaagaccgaagaccttatcgtcatgcctggtgcacccaccgggaaggtaccgcagatcgtgcaccgtggtattggtgtcgcgaatcagaaggtctaccagtcctctggtctggctttcacttgctcccagcccatgatcgcatctgacgtaaagatgatcgactatgagggagtgcacatgcaggttgaccctgcgggtggcggcgctaatggagacgagacgggcttcgcagtgacggcgtacgccaacagtaccatctacgtcctcgccatcggtggtatccctggtggttacggcgacgagcagatgacgatgcttgccaagatcgcggagacgttcggcgcaggaactatcagcattgagaagaactacggctacggcgcattcgccaaggtctggctccctatcctgcacaagacgtggaagggtacgatccttgagccttacgtgggcggtatgaaggagaagcgcatcatcggaaccatcgagcctatcatgggccgtggctctctggtcttcttcgagtccgcgatcaacatggaccacgacctcacggagttctacagcaacagcggcaaccgcaagatgtactcagtgttccaccagctcacgaagatgcaggccctcaagggctgcgtcaagcacgatgaccgggcggacgcactggaaggaagcatccgtttctggatggatcggctcaaggtcgatcagcacaagcgcaaagtccaagaagaggctcgcgagtaccagaagtggcttgatgatcctgtcggctggagccgcaaccagaagcccatgcgtgtagtattgaacgtgggcaacaagtatttcacataaggaggaagctatgcagcgtcatgaattctcgaattggatgtccacctggggtggcggcaatcaactggttaccgagttcgttcggctgaccgactacgtaaaggtgcacccgaagcacgcaacgcagatccttgcgctgttcgatgccgacgttgccaaggtccgtgcggacctgatcgcatcgggcgccgtgccgcctgtcactccggagggctaatgaacaagctgccttacatctccaaagcgtccgacctcggcatcgctctcacgttggccgctacaccggcggaagctcgcgccctcttgggtgttggcagcggcggaggtggaggcggcgctgtggattctgtcaacggacagaccggcgacgtcactctcgacgcagccgatgtcggcgctgcgcctgcgggcgctccgctgtcctcattcgcaaacgacgtgggattcatcaccgacgcagacattcccggatcgcccgtgctgagcgtcaacgggcagacgggtgcggtggcactgacagcgggcgacgtgggtgccgcaacgacggcacagggcgctaaggcggacagcgcattgcagcccggagacatcccggcacagtccgtcaccagcgtcaactccaagaccggggctgtcgtcctcagcgctgccgatgtgggtgctgttccaactactgccgtaggttctagcgtggctccgcttgttggcgggttgctaccgaactcctacctgccaccgcttgccatcacgagtaccttcgttgtgtcctcgcaggcagcgcagctcgcgttgactgtgcaggagggcgacgtgtgcatccgcacggacctgggcaagagctacatccgcctgaactcgtcccttggtacgatggccgactggcaggagctgctgactccgaccgcacccgtgcagtccgtcaatggcaagaccggcgtggtgtccctcaccgcagctgacattggcgtggtcggcttctacgttcctggcttcatcagtgggctgtctctggcgtgggtggacatccataccgtgagcgtgtctggtggcacggcgcacaaccaggccgctgacgccaactaccggcagaccgccgcagcgaacgtcacgatcccgagtactgcaagcacgttcttccacatctaccagtacgggaacaacctgcttgaggtttccaccgcagctcctaccacgccgtacgtcggcacggctgcgagcaagtccggggacacgtcgcgccggtatctcggctccgtggttacggacacatctggcaacgtggtcaagttctcccacgacggcgatgaggtgctgtataccgaaggcatcgcacgcagcttgtctggcggtgcagccaacgtgttcaccacagtgagcctgtcggcgctgatcccggccggtacccgcaccgcgctgctcgctatgaccaatggcagcactactgtgccgatgcgcgtgcgtcccgtgggctatgcaaacagcttgaacagccgcatgtacggcatcacaggctcaggcttcgcggctggtcccatcactctggtgggcgggctgaacgtggagtaccaggtggacgccaacggctccgcacacatcgacgtattgggctacaagctctcgcgttaaccataaggaggaacaatgaagagtagaatcgtcgctgtagtgggtgcatccctcctgagcgtcgcaggcttgttccatatccagaccagtgaaggggtgcgctacacggcgtaccctgatccggctactggtggggcaccctggaccatctgttggggccacaccggccccgaagtccacaagggtctgactgtaagcaagaagcaatgcgagctgtggctcaacgtggacctgcgcgagcatgagggctacgtccgcaacctcgtgaaggtgcccgtcaagcagggcgagtacgatgcgctagtgtctttctcgtacaacgtgggtccgacgaaccttgcgaacagcactttgctgcgtaagctcaacgccggggaccgcatcggtagctgcaaggagtactccaagtggatctatgccgataagcgggtcttccagggcctcgttacccgtcgatacaacgaacaggccatgtgcctcaagctaggagactacatctatgatccgcggattcgctgattacatcattggcgccctacttatcgtcggcatcttgctaagcgggtactccatgtacctctcgcagcggttggcacacgagaaagaggtcgcccaggactccaaggctgaggctgcggggtataaagtctacgccactgagcataagaaggtggccgaacagaaggaaaagactcatgttgaagttgaagaagcgttgcaacgacacgtggagtgggctgatgttcctgttcctgatgagcttgctgacaagctgcgggatcggaatccctaaggagttcctcaagccttgccacaagaccatgttggccgacgggcctgcgaagaaccgcgatgtgttcaacgtggctgtggatagggggttcgacatcgacgcatgtaacgcggacaaggctgcattgcgagcttacatcgaatcccaccctggtctccggactaaaaattgatagtctcgtgcgcgggggtacctcagatcgcaggctcccgcgcgccc

SEQ ID NO: 17 - DNA, 76340 bp, unidentified
  misc_feature 1..76340: note = the genomic sequence of a bacteriophage
  source 1..76340: mol_type = unassigned DNA
gtcagacgttgaggtagagcttcatgctgctctcgataaatctggtccatatcagttttccatcaggctacggtcgttacgaatctgcttactcagggcttcgatttgtcggtcacggagtccaagagttgaccggtactcacgttccaagcttcgcccttgttcaagagctgcgtcgagtcggcctgcatggcttgcgagacttcgacactcaatggttccagcttcggcctgacgttcgtatattgccgtgcgttgggtgttgagctgcatgcgcttagcaagatcagactgcaaggaagcaagttcaacagcatgcttttggttcgcttgtgaaagctcataagtgatcctttggttctctgcacgatgcacttgttctttctgtgcatagctatctttgagttgttgaatctgcgcaagatacttggctgtgtcttgatcccattgcagttgaacagaagcggctccctcacggaagccgctttgtttgattgaacgatagccccaaaaactcagggctaccaatgcaatgagaaccaagatgtgaggcaagtacttaatgagggtcttttgccacatcgaaggtatctccgaaatcagtacacttggtcaatggtacgttgccaatccggtgatcgacccatccgacagtgaatgtcttgaggttcgtcaggctgacgtagtgttgtgcttgataactgtccagcaacttgatcgtcaactcacatgccttgaccttgccacgtacacgttcaagactctgatatgcccgaatcgaagctggtcctaccttaccatccacggtaagttgagggtagtcttttccgtctcggttgagagcattgagactggactgaaaccacttggagccgcgagacggtccagcattcacaccgatgtcagtcagcttccaagcgacagcaggactgatctcaatcaagggtgcatagcccggcttgacgatgtagtcgttgtagtagatcgagttggcagcttcaacagacagatctcgcatatgaccggtataaccattggcacgagcaacctgctctgtcacaccgtgattcgttgcaccacctggatcagcagggttgttgacataaccgccttcgacagcaaccactgcaccaatgatcaacgcagcgatacctgcgataccagttttctttccattactcagcttctgattctgagccatctgacgttcctttgaactgtaggacacgggcaatcatcgccaagccgagaagaacgatggtgatgctttttccgtgtggaattttattgagtgaacccaggggaatattggagacaacgaagtctgcaatgttcagtagaaaggctccgcccatgtaccagatacttccaaacttccaactcttacgccagtttggaatcagcttgatcatgggccaccgccagccaaccatgcagcaatcttttcacgaccagtcagcaaagcagtgaccagtgctgtagcaacaacccatacccatttaccaaactgtcctgcacctacgaccttatgcttgatcgtaatgaagtcatcgataacaggcttctgcgtggtgaggctagtctccacattctgcattcgttgactcattgcaatgagctgctcgttctgagctttgagttgctgaagaatgtccttatttgattcagcgtgggtcttgagacgctcatccatgcgagccaagagaacatcagtagattcagccattgcccctgtacctttgaagtgttgcccgcagtttagggcaatataaaggccgggggaactacaagttcacccggcccagtagacagcatcgtctatctcaagtgcgcctcagattccactgaagcctgttgacggagttcagtccaacagtcagcagctcaccagggagattcgacgctagaacgtattctacgccatagcgttcacgctgcaccctgaccaccaaatctgtacctttcttgtaggaaaggatgatatcagcttggccggaaaacagggaacgtttttcgtcgagacagagcctggggctggtagcccctggaatctccatcgtgcgcatcccgttctgcaaggtgtcatagtagaagaacttgcacacgcccccaaccatgtaggcaatgtgcggctgcatcgcttgatcgaatgccagagcaatctgggtgatacccggttcagacaagatcgttacaggcaagactccctcacggaaaacctcgactcgtccttcaatgtactgggcagtccagagtgctgctgtcaggttcgcagtggcttgtccaaggacaagaccaccacgttcgtaatcaatcaatggctgtgctgagcggttctgttgttcgacatacgaaccacggagcaccttctcagaggctcggggaatcatccggtgtagcgcccccacgccatgcgaagagtcagattgacgatctcatcagaagtcttgggaacgccaggagtaatgccaatctgatagttgatcgcagcactaagagcacggaaaccagtgatcgttgcattgtttgcatcattgattccaagtcgcgcaagttgatctcgatacttactattcggagtgtaggccaaagtggccaactgataatttgtaaaagttgactcattaccatcaggcttgcctgtagctggaccagcaccagtaccccccaagtaccaaaagccagcccaaggatatccactgaacaaaatagtgccgctgcccccaccagcttcgctggtacccaacatcgtaggacgaatagtaaaagtctgctgtacacctttgatcgtctgagtctttacaacatcagccatatgggcatagcaacgaatctcatacgtcacgatgaggatgtcaccggtcaacaacgtgacagtcgttggatttccttgtgcatctttaatcaatgcgtgcgtgaacaacttgcgtccattgatctggttattgaacagaccaacttcagcaagattgacttcagctgccgcaggattgaactgaaattcctttcgataccatgcgtagaacggggcacttgtagtaataccagcagccgtatttgctccattggcagtctctgcattgaaagcaccaaacgttacatcagtgaatgcaggaggcacagcagaagtaccaacaccaattgcactcaaccaacttgagaggtattgaagatcgataccttcttgctgactaccaccgaccatttccagagcatagtcggtaatcagattgtcttgccacggaatcacttcctcacgaatgccagtagcagcacggatgatttcacccttgaagacaccagcgtaggagtgctggatttcaatgacttcgtttttgttctgttgctgcttcattacccataactccaagtgacagatggggtgttttcaagagaatcaatcggcatgttgagacggggaagtttcttaatttcgaagttggtgagtgatggtgtatgttcgaaagcttcaccagaagacgtactcttcctaaccgtagtcacttccatggagacaagtgagggagagtgagtaaattcttccaaacttggttcaagctttttacgaacactattgatttcaaaaattacttctggattttgttgaaatgcttctagctctcgcaatgttccaagcgtacgcaacgatgcaactgtcgggttgttagtaaagtcatcccattggtagaacggatacaactgactggtaacagagacaccatcttcagaaatgataccttgccacacagcagtacgaccagtggaatcagttacttccaagatcagatcaagatcaccttcaggtggtagctcattgatatctggatacaccagatggtcccagctgaagttgtccaaccacacattcttgttttcacggttacgaataccgaatgcaccaatagcaacatcgtgtgcattctcaggcggaacagcagtgacctttgaagggaacaccttgttcttgctagctgacatcacagcattgccctggctcacgtccagctcattgccatcaatgtcataccactgaaggatcacggcagcaccagcattgccttcagcactcgcaccttggcgtacatcacacattgctgtgatggctttgccttgcttcactcgaaaccgactggtggagacaagctttgagataccacgctcagtagcaaagcgaccactataagaaccagtcaatgcgttctcagttgaccgatcccacccaagtccgtactcccaaaatcgagcgctctcttcgaatccagcattacgaatgacagcaggaggcgtctgatattcatcagcacgacgaacccttttccaactgatgacaacttcttgagtgtcctcatcgatagtgaagcgtgtggtacttggcagcacactgccaccaatctgacgtgccttcgatggaccgatggcattgatcagttgcagtcgcccttcgtaatcctgattcgaatcgtagtcaggcagaagacctaccacatagagtggtaggtacgacttgaccttctggacaccaacaggacgttgataaatccaagtcgtcattcaacgagcctctggccgagcaggtagacacgcaaggcacgcccagtgccattgcctacctgagtgacactgagagagatgacgtctcccttgttaagcacatcgcctcctgcggcatatgacaccggagtcgttgcactggttgaagtcatctcgttgttgtcgatggtgagcttgttcgtcaggatcgatgcaccgttacgcaagatgtccatcgtcaagatggtgccatctgtttgtggctcagagagcgaaccagtaaggccagcattgaccaccgagtccagcttcatgctgtatggcagcgtgtagctatccttcttcgttcccacagtgatgccggcagtactggcaacagaacgatcgatcagctcaatctgcatcacgtcagaagaagcaacttcacggaacatgtcaccactgatcacccactgattgccatcagcattgaagcaggtagccgagataacgcaatcctgcccacgagtggtaggactgaattcctgtgctggatacagagtgccatcagctggattctccatagccaacgtcactgcaccagtaccacgctgaaggacactgaagaactcaccgttcttccaatcctttgtgtcatcacctgtcttgttgcgaatgagcaacgtcagaggaacattcgagttgacgaccagcaagctgttttctttggtgcgatcaatgacagtgttgttgttgatgatcgtcgtatcaacttcaggtgccacagtctcgataggagtcggagtctgatacggcttggcatagccacgcagaatcgtgtatccagctgcattgtcattgagtggaaccaagaagcgaatcataggagatgcaccattgatcggtggatcaatagtgaagtcaacaggattcacacccacgtagtctttctcaccgggagtgttttccacatacgtatcgaacagcaacttctcgtatgcatcggcaccatcgataggaaagccagtggtttcaccatcaccaaggaatgcccagtaacgaggcagcacactgccgtctcctggcgtaccttcaccaccaccagggtcagtaccttcgacgtagccgtagcccatcaacgacgtgtactcagtcccctgagcaccattcgtgttgacgtacaagccaccagttgagatgccttcattccgtggacggaagacaacttcaatcaaaaactgctgaccggggttgagatacggtggtgcatcactggttgcagtaaacgaaccagaggcaacgatctcaccgatacgcacaggactcttaccaacgttggtcacaacgatagtacgaggcactgacgaacgagacaggatcacgttgccaaacaccactttggcaggagccacagacacctgatacggatatgggaatcccaactccgagcagatgatgcggcttgaatgatcaggcaactgggacatggatgacctcaacggcagtcagaaaccacacgatgtctgccgtctgcaaagatgctggtgcattactgttcaacgtaatgacaacaccttgtgcttggtagctcacagtgaagtaaccagattcgctattgcaacgattaccagtgattggatctttcaaccagatggttgaatccatcacaccatcgagcagaaccaagggaggaaatagcagcgaagtagtcgtaccgaccattttccctagcagggtcatacgacgccaaggatcagctgcaaccttttcgatgaatggcatacgagacgcaacgaagcgaatgatctcgtaagccttcggaccaagcagacgatctaccaacggattcaatccaccatatggatcaagatgattacgcattagacgaagcctcctttttgaaagcgagtgttggtggtggaagttgaaatgctgacagcatcagacatcaatgcttcatcgcacagctgggtgaacattgtcaaatgttcctgagcttttgctgaggattcagcagtggccatgttcgtgtacttcttgtaagcgatgtaagacaccaacgcttcagtcagcacttcaggaagcatgatctcttgctcaagttcaccatccaacttcggatgctttgcttgataagtgatcgacaagatctgcccaggaattggacgtgatacttgaaggacatttccttgtggggtgaacagcgagtttggattcccatcatcattcaatgggtacgaatatccaaagctgttgtagacctgcaagattcgaatgacatcatcagtgaaacgttcttctggaagatccagaatgtaacgccaacgttccgtactgctgctgtcgtgcggagagaacttactgcgaagatggtagttggtcgtcagctcattcatcacgaccatgacatctttctcgatcagattgaatcgagtgtagatgcgaagcaatgcatcattcgcatggctgataacttgaggttgattctgctgatcgatatagcccgcaccgcttactcctgagaagagtgccgagtacggaccatacgatagcttctcgaatagatcttcgacgttcatcgaggtcacacgatataggagttgatggcaagtccctgatcaggtacttggtcgtgttcccaccgatccacttcttcaggggttgccggtgcggtttcagaggggagccaaggcttaaagtaaccaagctgactgatcgtatcaagacagtcgtccttgcccttaatgccagactgagtgaccagtcggatctgccccatgaacatgcccatgataacactccccttcatctcttcagggaaatacatcttgcctgccttgaaccaaggcaccacgagattgaagcggaccagcttgtcagtgcttgggcgaataccaggatcgttcgacttgctgttgctggcgaagttgaaccagatcttccggaccaacatctcacgctgaagccaagtgatgaaggcattctgctgaccgctgacttcgacgcctacctgctgagggctgtacttctgtacgaagtagaacagcttgtcgatggattcatccatcgtcgttcgcttagcaaagccatctacccagaaccaatccccattggaattgattgcccaaaccgagatgacactgtagtcagctgtcgtcttcttacttgttgcaaagtcagtggtgatgtagaagttgaaacttcccatcccctccatcaacttagcacgcgagtaccagcggatctcagcatcctgcaccaagcgttcttcttcagacgtaacctgaagcatcagctcttgcatgaatcctgcgaccttacctgtaccaatggatagatcgtattgacccttgatgaagtcaaaggtaaagcgatcatcccatgcaccacgaaactcttcccgtgtacaaggaaagcgttcgcatactggatacacgttgacatcccactccccagactcgactgcttcaacgatcacatcttctttgttgaatggcgtaccgttgaatacgatcttgcgacgagtaggatcaagcgcatggttcacaccgttatagacagtgttcttgattgcatccattgcagctttggagttggcatcaccatcaccaatcaagtcgtcaaggatgcaaagcgtaggacgtttaccaaagatctttgaaccacggataccagtctgtgcaccgaacatcttgatgccaagcttgtgtccatcaacagactcaaactccagatacgggtcagtgaaggtagccttcttgatccaacgctgaaggaatggactgttgttgtaacggaactcgatgttcttacgagcgttcttgacgccgttctccatggagtccgacacatagatcattgcttcaaccttgccatgcccaggcaagtaaccgaacactgcgagatacagtgtcatgtactccatgaacactgtggtctttgcagcaccgcgaaagagaaggttgaccagatagtcactggtgctttgtgccagcttatcgagcatagccaaatgcacagggggagtcttgttagactccccttgctcaccgttcactagcttgatgaagttcatgaactccatcgcaaaggtagttggaatgtagtccgtactattcaagaacgaatagtcaacatcatccaaccactcttcgagtgactgtttaatcttggccatgttcaatcactcgaccaagcttctgctcagcgatctgacggatcggtacaccttgtgcaacttgagagatctgagcttcagccagttctcgcaatgcacccttgagagattccatacctgtatccgtgacattgatgttcaccaatggtgccatgtctttcggcttctcggtatgggcaagcactgagttggctgcggtggttcgcaccatctcactctgagcgttctgcatcagatcaacctgcacgttcaatgccctctgtcgtgcttcctgattgatcagccagaacgggatcatggcttgctcaaggatagcttgtaccaacttacccttgtggtacatggccacataagcagaaatggtcttggcatccagcccacgtgcgagctgatccgcattacgttgtgggaacgtccgagcgtaggactctccgttgctcagacccatcatcttgtaggtgcagtaggcgactgcgttgagatagtcctcagtcttgaacttcccttcttgcaacaccttcgtataggtaatgaagttctcacgcacaacagcagcgatctcaggatcagtcacgatcccgttgatcttgtcagtgaactcttgggtcgccagacttcgcataccagcgggcagtgcttggctcacctgtgtaacagtcagtagatcgttgctcatcttattctcggtttgcttctattacagagatcttgccagcttccagaatacctaacgcatgaatgccattgaagtcttcgccatatccacggtacagatgacccccatcgcgcagttcaactacaactacaacatgcttcgcatcgaagtgaccagactcaatagagtcagccagattacgtaatgcctgtggtgcgttagcaccaaaggctttcttcctaatcggtgtcaccttgtccatgacttactctccctcaccagccagctcaagacgcttatccaagatagcgaggtaggacttcatcacactggcttgagcattcagcaacatctgcccatcagtccccagctgcttgaacacaggcgtctgtaggaatgctgacagcttgtggaatcgaccagccaactcattcctttcatgggtcagacgggtcaggaaattaccttgttccaacttaagcttgtctgccagacgccatccgaggaactgccagcagttgttgatggctcgctcctttgcatacttctcacccttttcctggtcgtagttctcgatgctcacgcaagccgaggaaccctcgatggtgaagtcattgtccatcgtcagttgacagatggtcgtcttgccgtcaggcagtagggtgtacgactccttcttaatagaggcgtggatttcttcgatggtcactttcggtgcgttgctcatacttatctctatcctatttaggttggggtgtaagtcttttcgaagacgctcttcggagaccaagagatgtacccggtatgggctggatgattccagctgccaccgtcttcgtattcgacaaggtagcctggatcatcaggattctcgttgtcaggcagcgtccagttccgataggtgttgtagtcacctcgtgtcataggccatgccttgaggtacttcgtaccgacatgccgaacaccagcaccaaggtcaatcatgtctttctcctatttacacttgaacaaacaaagccacagatatcagcaggctgctgagaccgaaggaaccccacatcacagccttggctcgtagctcccagagcatcgccttgtggtgatcctgctccattacctgagccgttctgtaatcctgatgctccatcctcgtaccctcttgctttcgtgtgaggctagactatagactgtctatagatagctgacaagactatccccaataccgagaaggatgggggtacgggcctcctatgattagtccttatgcttcgcataagtgactaaaaataaaggggaaaaagaactacacaactggaaccaagggagctatagtccacccacaccaagggtgctgctgtcgtcttggttggcgttgagctgtcgatgtgggttgccgtgtcgcggactttctctaccctactggtgtgtggggatataactaccagagctgttgtcttgttgcgtacctccgaccacagacgaccgtggatctaacgggaagctagccgctccctagtagcaagggcttcagtagctgccgatcagctagagtcactatgacaatcgaggccacctgttagcgcaggtggcttttttattgcctactcttctacctcaaacttatctcgcatatagagaactctcccactattatttttaggagagagttactccaacttatgttcagtagtaggaaccttctgcaatattttttattgacagtccattgcacttttatgtccacacacttccacacacacaaactacccccccggtatgttcacactcgtggtctgcacccaccccatgtcttacacactgatgctccgcatcctatggatctattgatctctgctactcatcttctttctttggttcagcactcacgctgttccttcatcactactacctatcggagatacaaatgaccgctcaagctaatactcgcgtcactctggctgccatcctcggcactgtcaccactgctacttccactgtcaccaataccttcgatgccctgaacaagggtatcggtatgctcaataccactgtcaacgatgctgcttaccgtcaggaaaagcgctccaagactgatcgtgctctctacgtcaagaacctcatccgggatacttcccaacaggaatctctggctaacgctcgcgtcaaagaattcctcaagtccaatcccgatgctgctgctcactatcaagctaccttcgacgaactcactgaactcctgaaggactaacaaaagcagatccacccttcggggtggatctttttgtactgatagaccattcagtagatagaccatcgtctatcgatagtcctatagagattggatgagtggagaagtgtcagagcactgacacttgttctacttccccaactcctacatcccatctctctagcattatcccctaaacattccctataccctggagcatctcaatgcgtaacatcgatggcaatatctggatcaacgaagttgaagatgactactacaaagtaggctactacttcaccgatgagaacgatgatttcattggtcctttcatctcagctgatgctgctcttaaagcagctattgcttatgttcttacccttggctaaacataaataggagagaactcatgttcggtagctttgagtgtcaccaatccaaacctttcgaccttcgtcgtgaacgtcgtcaaatgtaccgctatcacaagcggtaccgtcactccaaaaaggatctgtatgcctctggggtcatgcagtctgtccgtcaattcaacaaggtcatggctgctcagtacgaagcctatgaagctgaaaccggccaactctatgaatcatgagcctgctcgttcttacgatgtaggctgctacctctggggtggcaacttcagcctcactggcgctgaagctcgtgtcttacatgagcttctgcctcatctgaaccaaggaacgatggagtttgcttgcgtcaacatccaacgttctttcgactttgatatggagaataaccaatgctgaccgaccaagatctcaacttcgaacagaaaggctatgacgcctgggttgaactctgggcagaccagggctgtagccctcgtgctactgattgtcctgctcgttacatgcctgatggtcccaaccgtgatgcttacatcaagggttggaaccgtgctcgacgtgaaaacgaagagtaattcctcaacataaataggagatagatctcatgcctcgtttgcatcacagccagatcgaagatctcttggctgaagaccacacgtgtcctgattgcatgctggatagagctgactgcgtgtgcatgtctgatgcatacgatgatgtcttctgtttccctgactacgagcctgaagaaacttggctcgaacccgatcatcctgaattttactgaacctaactaggtgatagctcatgatcgacatcagcgtctccatgcccaagaagtgcttcaactattccctgggccatgcccctttcgaagtcaacgtacacgtcagctatgacgtggttggctgtgtccgtggcaaagagggtctggtcgtcatcctgacgactgaccatcgtgtgctcactccgtggatctacctcaaggcttggtggttggtgtctatgcacctcatcaagtactaccggtgaagccgtcatcctttggctttacagagttgcttatcgtattgatattccttgggatatcagtcgcagcagctctgttcgcctactacctctggaccctgttcaatgtctaaccgtctcgaccgttcgttgggcgtcaagcctgtggactatcacccgatgtccaagaaggctgctccgcagcccaagggattcaccctcaaggtgaagaccgtgatcatggtcatgctcatcgcaatcactgctgctgccctgtaccagtcctcgcactgcgtgcaaggtgttcgctgcgctgattgatgttcaacttttaagtcaactttcaactaccttctagagttaaataggaggtaggtgtagaacagctcacccacagctgattgctttttgtgggtatcaacccgttaacaattcctttcaaactcaactcaataggtatcaacatgtccgctcagatctccgaattcgaacgcaccttcggcaagaacagtgcaaccaacgaagaaaccaagtccaacgtcaccacgtcgaacgaccgtcagctgaagcccaaggcacagctgtggatcaacgtgggctacgaagtggattcccacgacaaggatggcaacgccgtcatcgagttcatcagcctgccgaccggtatccccgtcgataccatggacaagctgccggccaaccagcgtgatgcctacttccagaagaagcagcaggcgtccaacaagttgctggataccgtcatcgccatgggcaagacgttgcaaccgggcgaagagaaggtcatcggtgcacgtggcagcttgcagatccaggtccgccgtgtgaaggctgaagccgagatcgtcaacgaaggcgagaacagcctgatcgtcgatctggtgctgtaatcgaatcacccatgggccttctaacgagggtccatggagctgtctattcaatgtcactgggtaccaactaacctacacttgagtagatagctccatgcaatgggcatgaaccaaggaattcaacaaatggctatgaccaaagtacccaagtcctactacgcagcagctgagaagctgcgcattgcaggactgttcaacgttggcaaacctgcctacggcagtagtggcaagcgcttgaagtaacacatgagaggactcttcggagtcctctttcttttttcaactcacctaaatcctaaaagtaggatttagaggtatcttggtagaaagatacctatggtcttactcttacacaattcaaggtgaataggatgaagaaatatactaagtctgaagtgaagttgcttaagcaaatgctaaaacttctacgtctggcaaagcctgaagtcatgactgaaggttatatgacgaacagtcaagagaatttacggcgaggcttatgcggagcattacagcgagtattaaatagtggcaacggtcatataaacagatcactggttgatgcgtatcataaactgaaaaatttaatcaatagatcattgaatggtagattattgaatggtgccatctggtttgatgacgcttttaggaaattaaacgatggtcacttcaatgatgatcagattgcaatgtatcgtcatcaatggattgatcaattgatccgtgatatcgatgctgcaattaaatactccgaaggaaatactgatgaagcccaagatctacgctggcatcgggagtcgtgagactcctgataacgtgctggatgccatgtattccattggctacagcatggctgaacaaggctggggtctgcgctcaggtcatgcacctggggctgacactgccttcgaaaatggatgcattgcagctggtggcctaaaagagatcttcgtaccctggaagggtttcgagggcgctcctggcatgcatcctggctacaccgtacccaagttcgatgatcacctcatgtctcttgctgctcgcttccaccctgcgtgggagcgttgcaaggacggagccagaaagctgcatgcacggaacgtgtgtcagctcctgggacgtgatcccaagaacccattgatgacctcggtcgtcattggctggacacgtggagccaagggggaaggtggcaccggtcaagccttcaggattgcacggcacttcaacattcccatcttcgacctcgctgaccctgctcagtgggaccacctcgctaaatttgtggagaacttcaacaaatgaaatacatcgtcgctcttatcgcagtggcaatgatcatgttgatcgctgccttcgcaccacagctgatgcaactcgcctggggtctcctggccgtagtgctgatcctctttgctgccctggttctgaccggggtagcaatcctgctctggacactcacgcgcgtattgcgtgggtgatcccctaatcctgtgagactcctatgtcaactcgcgtattcgtattcggttcgaacgaaggtggcatccatggtgctggtgcagctcttactgcataccgcaaacatggtgctcgctggaactatggctatggccttcaagggtcatctttcgccattcccaccaaggaagccactgacggcaaagtcggtaagacattgcctctcgaacgtatcaatcaatacgttcagggctttcttgcgtttgctgctggccatcctgagcttgagttccaagtcacccggatcggctgcggccttgctgctctgagtgatactcagattgcacccatgttcaagggcgctacttcgaacgtcttgttcgatgaagcatggcgttactttctcggcgagaaatacaactactggggcacattctgatggagattgatggctggaatgaattcctggaagctcgtatgcgtgtaattcaatctgctcgtaaacaaggactcagtgaaattaaaactgctgagcttgtgaacatcacaagcatgacgcaagcattattactgatcgctcatgctgatcgactcaacaaggaatctcatggcaactaaaattgttcgatttgatcgagcttactttgttctacaaccactctgcatgcattacttccctacagggggtggtgccaaacattccgtaggacgaattcgagaagttagcttcaatagtattggtgaagttactcgcttcgagactccaactactgtttacgtacaggtgaagaatgactagcaaaaaagttacttatgctcttttcaatcatgcgactaacaggattgttgttgactttggcaacagcgatcgatcgcttgctgagtacatcgaacgatacaagaagcaacacggtaaagcgcccaacgcattaccggtcaagatcactaccgttacaacggtcgaatcccttcctaactaaggtgttagtcatgagccaagatgcaacgatgcgtgctcatcaacagaagctcgaagagctttactccaagaaccagctgatcccaagggtcaaagctgagttcaacaaacccatcttcattgatcacatgaagatgcataacgtccctgaagacttcggcctgaacctcttggttcaaatcgctctgcacaaacgtgctgacctcaagactctgatcggtctgctccgtccattcgcaaatcataatgcgcaagctgttgctgatctgctggatgtttgtatcaacattggactggtccactttgattctgatcgtgatcagttcattgtacgcttcgaagttcctgaagaagtgcagcaagaattggatcgtttccagttcccactgcccatggtgattgaacctcttgaggtcaagcacaacatgcagtctggctacgttaccaagcatggttccatcatcttgcgtaataatcaccacaacgatgatgtgtgtctcgaccacatcaatcgcctcaacaagatcgctttcaagatcgatgacgtggtgagccgtctagtcaagaaccagtggcgtaatctcgacaaaccaaaagaaggtgagtcgaaggaagagttccaaaaacgtgtccgtgctttccagaagtacgaccgtgttgctcacgatgtgctggggcttctgacccaggaaggcaacaagttctatctgactcacaagtacgacaaacgtggccgcacatactgtgttggctatcacgtcacctatcagggcgcaccttggaacaaggctgttatcgctctggtcaacgaagagatcactaccgatgaatgagtataggattcagaatacttacgaagcagcgaatctcattcgtcagctggttatcgacaaagttcaattcgctgtgctctatgacgataagtcgaaagagtacgtcatcaacgcaatcgagaaggaataatttatgtgcgaacaatgtgaccagatgggtattccccatggttctgctctgagctttggtgtgaccagcaatgatgtcatcatggctgtggtctcagtcaatgaagtgatcattgatcacacacccattggcccatgcaatgaagaaactctgcaacgcatggaacagttcatcaaagaaatccgtcagcacatgctgctggaatctgccgtaccaaccggcaaggttaattgagatggcaacagaacgtgtgcactttcgtctcatcgtaatgccatgttgtcagcacatgttttgcaatgtaaatcctcgttggccttcattttgtcctaactgtggaaaacatgttttccctgaagtacgtggtggtgcactgatcagtgatgacagtgctaccctcaaatacgacgaaacaaagaagccgtaatatctcactgaattctcaagacgcttaggagcagagaatgcaaaagttcaccggtaaacagtatctccaaattgatctggccaacaactttggcctagacaagaagacctgggacgaacgtctcagctggtttgctgagaatcagcacaacatcaatggcctcttgaaccaagcagatgaacctgcactcttcttcgctgggctgaaagcatgggactcgttcctacgtaaagagccgtctggctatatgatctcgctggatgctacgtcgtctggcttgcagatccttgcatgcctgacaggtgatcgtagtgcagccatgctgtgcaatgtgctggacttcagcgaagaagctgttgttcaacgtcgtgacggttacacagtcatctacgaagcaatgattgaaaacctcaaggctatcggcgtctacgctggtggtattgaacgtgatgactgcaagcaggcaatcatgactgctctctatggctctgaggctatgccaaagcaggtgttcggcgaaggcgtacagctgcgtgtgttctatcagaccatgaagcaatttgctcccggtgcatgggaactcaatgacttctttcgtcatggctgctggaatccagaagcttactccaatgactgggtgttgcctgacaacttccatgtccatgttaaggtcatggatactgtcaaagaagtagtgcagttccacaacaaaccctatgacactttctatcgtgtcaatcagcctatggaagaaggccgctcaatcggagccaatgtgactcacagtctcgatggcatgattgttcgtgagatggtgcgtcgttgtagctacgacatggatcaagtgatcaaggtcatcaatgcaatcgatgatcctcagctggaagccgagtctggccccaatgctgaaatggtcatcaagctgtgggatcactacgagaagtctggtttcctgagtgttcgcattctggattacctcgacagggacactgtgcactacgtcaacactgatgtcgtcatggacctgatccagactctgcctgacaagccgtttgaagttgtcgctgtgcatgactgcttcaggtgcttgcctaattatggcaatgacctgcgtcagcagtacaaccaaatcctcagcgacatcgctcgttctgacatgctgtctttcatcctcactcaactcctgggtgtgccgaccaagatcggcaaactggattcagacatgtggaaagaagttctacacgctgagtatgcattgtcctgataatctatatgggggctaccaatcggtggcccccaattctgatcagaaaggatagacaatgaatcaccaacgcctgcgttataacttcttcatcaataccctgggtcgcatcatctacgtcgtgcctgaaggcaaaaccggtggtccgaatgcccgcccaatcggcgatttcaagctcgaagagggtgaacaacgttccttcaaggaataccgcgaagacctgctgaatgagctggaagtggctctgcaaagcattccggatcaggactactcgacctacaccatcaagatcacctcttgggatggtcaggaagaagagatcctgccgaccaatccggtcaatgaaggtccccgcgaatctgacctgaagcctgctccgaccactcctgtgggccaagaacagctggaacatcaggaagaagaggaacagggcgaaaccgaagaagatgacgataaccggtaactgaaagaccgggtatcataaggggccgccatagtgcggcccctttgtcaatctccgtaggaaagtccaatgcccatgctgcaagtcgccttcaaacaggcaatccccaagatcgccctggtccaggccgacaatgctgccatccctggcggctatgtcgatgctggctccttcgatcatcccgatcctgtctaccctggttccactgtcctgtatcacggtgttcgtgatctcctgtacaagcgagctgagctggacatgggtatcgtcagcatccagcttgctgctggtgtggtggcgtcctatgtcactcaaatcgatgtcccctggggcaatcgtgacctacgtctcgatgacccgttgtacggtatggaccgcctgaatgctcgtgcatggccaccgcatgctgctgatacctctctgacgtacgcttcaagcgatccgtctgtgatcagcgtcagcgaggatggaaccatcattgcccacaaggccggtgctgtcatcctgaccatcaccgctcctggcagtgaaggcacccccaaactgaagcgtgagctgaccatcactgctggtggtttcagtgagaatccagccgaagaagaatcgcctgcttaattcgtttcttggatcaagcaaacgttgaaaagcccgcagaaatgcgggcttttttgttgggggagcgatagacaaagaagctcaagactgtccgaaccaactacccaaaccttcccacataccgttatagccctcagccatctcagacagagatgctggtgtccgtgccttgatcagacctaccgccttacctgctgtgtaagcagggatagcaaatggtaggctcaagccggccatcactgggctggactttgcccattcacgtgcaaacgctcgatgctccaacggagcaagctgagcttgccttggatcattcgctggaatatttgcccgaagattgagcaaatctgcatgccccatcttggtgtaatcaggttgctccattgtctaagccccggctcaagaagccgtcatcataatccaaaggatatcccaatgctcaagtggcttctcaaaagaaagaactccaatctggatgttctcagctatggcgtaatcacgtacctcttcggagctgaagtgattggacctattgcatacattctgctgatacttctcattgcagctttggttcaaattgctgaaatttggtacgaacggaattacgaagattaaggatttttcatgcgcccaagcaaagtatacaaacagaatgttcctactgtgtttgagcaattgatgagcattccttatgacaaatggttagtgatcactagaaccatggcagctggtggtcccagtcgtcagaaacgaatgcttcaagatctcaaaagcatggcacagctggccaatatcaaagtcactactattgaccctactacggatcagtacttagggactcaattcaaaattggtaagccaacccccaactcattaaagctctattcttaatagagaaatatcatgaaaaaagatcgtcgtaagacgatcattgagaagatagaaaaccggtgcgacattgttgacaccggctttcgtatcaacggcaaagcatctccttgtcatctatggacagggccgacatcaggcacaggtcgtggcgggggctatggccgtatgtgtctcgatggtcagactgtagctgtacacatcgtcagctacactcactacttcgggtatatcccgagcaaaaaacaaatcgaccatctctgcaatcaacgtgcatgctgcaatccgcagcacttggagttggtcactcatctacaaaaccaaaggcgacgtgacaaacgagccaaggagaccacatgaacactgaagagaatgacgtcttaggttttcgtgcggatggaactcctatccgtaaagccaaacctgggttcctaacgactgctgcattcatcatgtgcagtcattgcaataaagcaatcagttcaagcggcgggccatcttatggtgcagtctgcattagctgtgctcagtgcaatcattcgcaagaatcagaggaatcttttgaatgagtaaaacaatctatctcgatggcacagagactctgatctacacacgttcactcatcgaaaataattaccgtccaaactcgatggtcagtttagatgaaatggaagttgtcgaatgtattagaactgcttgtctttacccagggcagttttgttctatcaatttctacacaccaaaagatccctacaaacgagaagctttagctagaaaatttctagctgcactcgatcttagggaacatcattgttacgaattacgtgttcatccttatcgtatgagtttgatgatcagaaatcatcgtcgaaatgaccaattgcaatatcattatccagtagaggcacaaatcccatggttgaaatccactccgtaaatagcagacagctcggatcaatgatccagcaatgtctggaagcaggcgtagtacctatgatccatggttcccctggcatcggtaagtctgctgtgacgcatgcaatcagcaagcgtaacaatctcaagatgatcgatcatcgtctgagcactgctgctccggaagatcaaactggcctgccatttcgttctgaagatggctttgcccgtttctctcctttcgctgatctgtttccgctggaagcaactccattgcccaatgggtatgatggctggctgctgttccttgatgaactaaattctgcttccaaagcagtcatggcatctgcctacaagctcattctggatcgcatgacaggtcagcataagctcaacgagcgttgcatgatcgtcggtgcaggcaatctcaagactgaccgtgcgatcaccaatgacatcggtactgcattgcagagccgtatggttcatctcgaaatgcgagtagatcacaagatctggatggaagacgtagcactgactcagaagtacgatgagcgtatcgtcggcttcctgagcatgttccctgaccgtctcatggacttccgtcctgatcacaatgaccgcaccttctgctgcccacgtacgtgggacttcatgaatcgtcttctgtacgatcccgtgaatggaaagcctcgtgaagtgctggacagcgctgctgctctgtacgcaggtaccatcacctctggtgtggctgtggagttcatctcttactgccgaaacgcagctgatctggtcaacatctctgaggtgttggctgatccactgaagtgtcgaattcctgacacggcagctgtacgctgggctacgacaacccatctgctcaatcgagtcacgaacgataatctgggagatgtgctgaagtacatcgagcgtatggacgcaagcttcaaaatcatgtttgtccgtgcactcgtgattcgtaatccactggttgtcactcgaccggaatatgcaatgttcctgtccaagatgaccaaccttctcaatagctgagccaaggaggctgtatggcattctctgccgtcgaacctaacaagcataatctgacacatctgaatcatcagatggataaggccaagaccaaaatcttcctcgggaagcatagtggtttctttggctcgttgctgtgcagcctcgacttcatctggtctgaagatgtacctactgccgcaacagatggtatccgtctgtggtggaatccagaatggtttgcaaagcacagcatcgaacagatgtcagtcgtactgcgacatgagcttgatcatgtcgctcgcttgcatgccattcgtcgtggtactcgtgatcccaagacatggaattatgcatgcgactatcgcatcaacaatgatctggtcaacgatggattctccttcaaaggactgaagccattgctggataagcagtatgatcaaactggcgtgcttgcttcagaagaagagatctatgatcttctactgcaacagagcctcaaccagaatggctcatggggcagcggtgacgttgacctagaagaagcattcaatcttcctgtcgaagaacaagctcgtgccatcaacattgtcggtagtgctatcgcagctgctagtgcagcaggcgaaggcattcctggcgatgtcacaaaggtcatggatcaattccttaaccctgtcattcaatggcagatcgttttgatgaagttcttcactgatcaaatcgatactgactacagcatgcgtcgtcccaatcgtcgtcatgacgacatctatctaccatcgctttgcgatgaagatgatggccgtctggaatcactactgtatttccaagacgtttctggttccatcactgatgcagactcccaacgcttcaactctgagttgaagtatgtctgggaagtactcaaacccaagaaagtaaccatcgcgcaattcagtactgagatcaccaaggtcgatgtactggttgaagaggatcgattcgactggatcgaaacctatggcggtggtggtacatcactcgttcctgtgcgcgagatgatcctgaaggaaaagcccactgcggctgttatcttcagcgatcttgaatgtccaatcatggactgcacaggcatcacttgcccgatcatctgggccacgattcgtaatcgtggagccaaggtggaaaagggtcaaatcatccacatccgctaaaggaaattgcaatgtccattcgttctcgtatcgctggtatcgcctctgccgttggtgccaccacgttggcagctaagctggctggggagcctgttattcaggcacaagaacctgctggagttctatctcagcctgaagtgaagcgtcttccgcgaaccaaagaaagctggtatcagcgttgggtgcgtgagcgtcctcggcgtctgcgttattacgcaagctacaaaggcggaaagcatcgtcgtggcgttcctgcgcatatccagcagcagtatcagattgatgctgaagcgaagcgtggtcgtaagcgagtgaagtgtgctcgtgatcattcgctggctacctacaacaatccttgcttgcaggactaaacaagccatgatcatcaacagccacgtcctgctgagcaaggcacctatcaaggacatgttcgctacgaagcagtctaatggtgatgtcagcttcggcatgtccgaggctggatatgacattcgtatcaagcaagatgtgtgttttacctcatggcaccctaagttcaaacgctttcagcttgcatctgcaatcgaagaatttcagatgccagatgatctggtgggcattgtccatgacaagtccacttgggcacgtcgtggactgtccgtcttcaacacggtgattgaaccgggctggaaaggattcctgactttggaacttgtctaccatggtcaaggggacttagttatccctgctggttcaggtattgcccaagtggtgttccacgagactgctgtagcttccgcatacaatgggaagtaccagaaccaagaggatatgcccgttggaccacgacaagcctgaaatcgactacagcaaataccctgagccgcctaggccaaaagtgcctacgcatccgctcagggtgtttactgaacgaccgcctagggaacatcttcccgaacctgtgaaccgttggcacaaaaacattactcgatctaatcgagcaaggtgatctatgtcagtacccctctgtcttgcttgtagcaaagaaaatccttgggtattggctagcagtctatacacagaaatctgtgctcaatgtgtagagtcagaccctcgcattgatataaatccagagactaatgcttacgcattattcgggtattgccagggtggttgtgatagacgtggaccagtcaactatggcagacatgaaacagaattcatgtactactgcaatggatctttccactgcataccttagctctttccctgggttcatcccatcaatcaaacatggagaaatacatggcaactgccaagaaagtcgcatcgaagaagactgccaaaaaggctgtcaagaagaccgctaccaagcgtgcctacaatcgcaagcccaaggttgctctggaagaagcaggcattgtggaagatgctctgaatcagcaatctgatgtcaaagctgacactgcatgccaagctgctgtgcaggacactgctgttcctgtcgttcaactgaccgactacagtctgtgggatctgcgtgcactgccgaaggtgatccgcattctgttcctgttggaactggaatcgttgggctatctgttgcagcctgatctgattgttccgagccaaagttcggtcatctgcaatactgacctgatcgaaatcatcaagttgaaccacaacaacaagctgatcaatttcgctcaattcggtgagttggaactggatcacggtgtgatcgcagagccgacctatctggaaagccgtctggacattttcaatgtccgtacttcgcgggctgctccaaccgagatcaccctgcaaggcgaacgtttcgttcgcatctgaagttgaaacggtgtcccaggcccatgaacctggggtatgtcctctgggaggactgtatgaggccgtgaggctctaagaccatgcagacaggctccgtcctggcagagggtgaaaacccctcacctactgagagcattgagaagtccgcttagagcttgttcaatacgctccgctctggttgcaacgctgatcgtatgcagcttgaactaaccggacaattcgaacatccacaacgcatgttgccgaaggctgattgcggcggacttctgagtgcttttaccccaatcaacaattgtggagaacagtatggcaactcgtatgcatattgttgtttcagacgacttgaaaaagcgtcttgataaaatatctgaagaaaacgaaagtacttcttcagagacacttcgtaaagctattgttcttttttgcgaagcacacgaacgtaagaaacgttacagcaattcaaagctcgggttcttcaacgaagaaactcgcgtatttgccgaaatcattaacctctgaggtaatcatgtctgaattcaataagttcggtgcagctgttgctgcacgcttcgccctgatgtgctcattcggtgagctgtatcgcacgactgcaagtgctgatgaactctgggatctgtatttggcttccttccctgaaggcaccaatccgatctttcgtgaacgtactgagcatgatggttcctatgacaggaacttcatcaagcggcttggcaacgttgttgctatcgatccgagcaacgatcaagttgtctcactgtggaacagtctggaaaatcttccatatccctatgatgtggtagctcaaaagatggctgatcatgttggtcgccacgagattacaaatctcttccgaaccaaggagctggatgcaggccataagccgaacttcgagctgatcgatggtcgtcagcatcagtggacacacttctatgttcgtctgcccaacttcgtcatcactcgtgatgcaggtgctgctatcggtcaacgtgcaacgaatgtctctgtgatgttccgtagcctgactgaaatcaaccagagtgctatcgtcgatgttctggatctgatcgagcagaatgcgctgtatcgtggtgaagaacacaagcctgctctgctggcatttcagaaagcacagaataactttctgatgactctggaaggcaagcacaacacgtggctgtggaagaacagcactaacaatgtgctgatgatcaagaacactgctatcggcactctgctggtagatctgtctgatggcatgccattggatcaggcagtgaagtcgttcgagtcgaaagtggctcctgccaactacaagcgcacgtctgcactgatcaccccggctatggtcacaaatgccatggcaaagatcgaagaactgggctatgccaatagcctatatcgtcgtcatgctgtgctggccgatatcaatgtcaatgacattgaatgggctgatgcttcagccaaaaatgtcatggctggttcgatcggtaatgtgctaatgcaagctgctgtcaagaaggctcccaagactgacactctggaagaaatcaacatccgtgagttcatgtctacagtacttccgaagaccacttcaatggaactgtttgtcagcaatgctctgacccagaacctgatcaatatcactgcaccggaagatgcagatgctccgtcaatgttcaagtgggacaatgcctttggctggtcctacaagggcaatgtgactgactcgatcaaggaacgtgtcaaggcagctggtggcaatgtcaaagcagaccttcgtgtctcgctggcatggcacaacagtgacgatctcgatctgcactgtgtgacccctgatcgtgaacacatcaacttcagccacaaggctggcgtgcttgatgtcgatatgaatggtccatatcaaaaggatgatcgtaatcctgttgagaacatggccttcatgcgtcctcaggacggtgtttacaccttcagcgtcgatcagtactcagctcgtagcaacaaccaaactcatccgggtttcacgttgcaagtcgagtgtggcggtgaactccatgagttgacctatcagcctgcaatgcgtagtcgtgcaatggcctgcatctctcttgagatgaagggcggtgtcatcaaagaactgaaggttctgaatgacaagttgattcaccagggacgttcgcagaaggtcaatggtgtcaacactgagtcctttgtccgggtctcgaccatgatgttctctccgaactactggggcgatcaagccattggcaacaagcattacatcttcctgctggaaggtgcacaaactgatgaacctgttcgtggtatctacaacgagttcctcaagtcacatctcgaagcacaccgtaaggtgttcgaagtgctgggaaccaagacggtgattcagccgcagggtgaacagctggccggtgtcggcttcagctctactgttcgtaattcggcactgatcaaagtgtcgggtccaaccatcaacaagacctacaaggtcatgttctaaggaatcaacatgtctgagaaaaacattttcgaggaagccactcgtgctgccgctcgattcccttcgccggttggtgatctctcaaccgagcaactctggtcgctgcccttgacttcgctcaagggtgccaacctcaatgacatcgctgtgaccatcaaccgtgagttgaaggcacagggtgaagagtccttcgtggacaccaagcccaatgcgaagtcggctctcctggctctgaagctggatgtgctcaagcacatcatcgctgtgaaacaggctgagaacgtcgccaagctcgacgctcaacgtcgtgcagcagagatcaccaagatcgaagagatcctcgtgtcgaagcagacagacgccttggcgtcgagttctgtcgaagacctggaaaagcgactgacagaactgcgcaagtaataccgttttatggattacctaggtgtgcaacagcggaacgcttggacaatagctatgtccgggttaggtcattcgagcgggtcggcccgtaccaagaagctgccaagacacttaccgcaccaccgtccatgggggtgagaatgtgaaggatgaaagcggccttcactaggtaatccgccatatgtaagggggccactcaatagggagtggccccatgccaatctgatgagtccgttaggacgaaacacactctgtgtgtaattggctgtttgagatgaaagggcgctaccctggaatcaatattgttcagcccgttgtcgatgcgatcatcggctaattcagcactgaggatgtgctgcacctgttcagtgccctcgcaaggtacgttgaaccaggggacgcaagtaacccttagagacgtgtataaccggaagtctaaatccggtgctgtgtcctaacccacagtgagttgataccaaatagagaagattaggctcgcttggttaagcactcgtagacttggcaactacatacacgtctcgccttcatatatttgaggtagcaccccacttgtgctcttgtacaagatagtctaaggttgctgccacaacgctttcgcgggatagttcagttggcagaacaccggactcataatccggatgtcgtcggttcgaatccgactcccgcaaccagctttacctgcctgtcgtgtcgtaagactctaagggcgtcgaactgcaagagctgattgtcattcgagaggagaggcaatccactagcagaggattttttgtaagactctgtgttgacgtgagaaacgctttggccgcagtacgataggcaggtaatctagtttcatgagggtgagtagctctggcgtggcacaggccatcaactagctggaagctcagtaacgccagggttgagttcctgacaccttcgccaatttcattgtgggatagctcagttggtagagcacagtcctgataagactgcggtcactggttcaagtccagttcctacaaccagtttcatgggcggactacggtagctccggtggggttcgactccctggccgtccaccaagtttgggtgggagtagtaggacacaagcgcgggaatttaccgtgcgtgatgctgcttccacccattagctctttgacaatggatcgggttatcagatgggcgctgaggcagactgtaaatctgccgtctccggactcgcttggttcgactccaagctgatccaccagtcaatcgtttcctgggttgttccgccgtatggacggcaagcggtcttgaacaccgtggcatccgaaaggttgagggttcgattccttaacaacccgccatccacttcatcgcaagcactctcgtaagtaggcacgcaggccatcgaccttcggggcagtaccgcgaacgacgaaaacgagagtgctctcgatggagagacaggatagcttcaatgcttcgatggttgaattccatccagccgagggaaatttaaacgggtaactcccgccttggttgccagcttggggaagcgccagttttaggacaagtgacagagtggtcgaatgtagctggttgctaaccagcagacttctcaagaggtccgtaggttcgaatcctaccttgtccgccatagcttcatgggattagcacagcttggtagtgcgtctgctttgggagcagaaggtcacaggttcgaatcctgtatcccgtaccatgttcaactattgctggtggaccagcataggcactcagcgaacctgtactgccgagtcttggtggaactaagacatagttgttcgaactgctaccacatgtacttcccctcgccgacaggtcagacacggggagactaccgggccaagggcaaatcccttggcatgaaccaagaggatgaaaaagtcttcttaggcgtgtggatagcagcacctattcaggggaatcgtacagcggttagtacctcagcctttgacgctgataaccttggttcgaatccaagttccccttccaatgctttttatggtgtgggtgcgatcagagcaatctgatggcttccataatgcaactacgtctacgtttcgtaggctagtgagcttctgtgcggcattagtacctggctgttgcagcctcggaaaacctgtcaagtacagcagtaggtaatcaaccctacgcccacgccgccatctatgccgtctttagaccttatagaagtgaagaacttcagctggggacggctccaattcgatccttccatgggtcgtaccttaaggtctggatggttatacctttcaaggacggacctttataaatgtctaccaaaggtagcctgtcttccgctatagaagaagatagttcgttgtgagtacagtttctttaaagtgaactcaccgtgcatacagttgcaggatttcaaacacgtaaactaccagaacctgacagatgtagtctctaaggctatatctgaagctgcacctagccgattctgtcggtcggtgaagaagcgaacatgtctgtattctggttcgacagccagtctaagaacagactcttacttcatggtgcagccccagatgttgcttttaagcaatccgacactttgttaacgagtctagcactcggcaaacggtgtccctgcatatgggtaagcaggcagatgtagttacagggcactcggcttatatagcgcactccctggaagctgcatctgggaattcttccgcaagttagtgactgacggtgtagctatcgcgctgccgttaaaacattgtgagacctgagagggaggtgatatcaccctagacggtcggcgaatattagcctgatcagctaaaaagctaggagaatttccagatgttgcttcaacaagaagagcgtatggtctatcaaccatgacgcatagatgcttggcttacctaagcaacatcgtctacagacccactatgctgagtgctcaacagagagccatagcttccgaatgtgattcccctgtcacgctagaagctatgcggattcgcaattcggctcagctcccccttgaaagctcagacattcgtctgggcttttattttttggagatcatcatgagcgataccttcgaccatgaagctgaagcgtgggatgatcattgtcttggggaaagacctgatgatgatctcccagcattcatgcgtcgccgcagggaaccaagacgggaatatgtcccgtatgaaagacctgccccaacgtatcaagctttccctctgattcgtgaagtacacgagacagagaaggctcatcttgttgtgttcactttcgatgacgaagacatcgagaggtggcttcccaaatcacaatgccgcattccatacgctgacctgatcgagatatcgacatggctcgtaggtcgaataaaggatgagatcaatgcccgataacaaaaaatcaaattcatgcttgcccataaccgataacctgattcgtgaaatatttatccgcaacgggtttgtcatcaaagacggtcacaaggatttgaagccatatgtgtatgcagccgcccgcgaacttttagacgccgcccgccagcacgcgggacagtacagcgtcaagacggaatccggcgaacttccatgcagccttgcagtggcttcagaatgggagaagcgcgaggaatacatcgcatcgctggaggcccgccagccggtaggggtggagcctgtggcgaaggtgcgacaggatggcggaaacgggccggttgtgtggtactacccacatacgttctatgggaccaatattccagacggcgctgacttattccttggcccgcctgctgctgtgccgattgatgggatcactgccgattgggtcattggctacttaggtagtggtgagtccaagctgacgcataaggcgattaggtacgcattttcagagtttgcagcactcgccacccaacccaagccggcagcggcgaaggaaagctcctaatgatccaagagctattgcttcttctgggaatcatcaaacgtcgtaacgtaaacaggtattacagaaatggctagacccaaacgctctgattggtcatatgacatgaccaaagctcctcatgataaatacatcgtggtcgaagggaagactgacatcaacaaaagctcaagcgactttgttgctatttggagtgatgtgtacaacacattcatttccaagactggctgggtcattgttggagtcaatcgttgggctgaaatcctatgagtgatgaagccaacattgctttcaaaaactggcttgctgcgaagcgagctgccaatccaaagtttgctaagaatgctgatctgaattctgctgggaaccatgccattgaatatgtcatgcgactggcgttctatgcaggagtcgaggcaaccattcaactactcggagacgctcatgtcgaagacgaagagtgacttgatgagtgatccactcatcaccaatgaagcactggctctagctgtacgtgaagaagctatggtcaaagatatggaccatattttcgaacgtgcgtctatcatcgcagcagagcaggagcttgaaaatgaaatccgttgatcaaccaatcatcatcgaagactcaatcagtccagaaggcattcgcctgacgacattccagctccgttactggcgtccgattcattcggaattgatgacacatcgtgtcttcagtcgtaacgccggtagcagccgtgcacgaccatccaaggcaatcattgaacaagtccgcactgacccctggggtccacttcattggggagccaatcagcccggcatgcaagctgatagcgaactagacgaagaaacgatacagcgagcaaagaaaatgtggttgtttggggcagaacgagcagcaatgactgctgaagctctgctaggcattaatgcccataagcagatcgtcaatcgtttgctggaaccattcacctacatcgatgtcgttgtgacagcaactgactttgccaactggtacgcattgcgcgatcacacagatgctcagcctgagatccgcaggcttgctgaattgatgaagcaagcgcatttggaaagcattcccaagctacttcagccgggtgaatggcatctaccatacatcagcaaagaagactgggttgaagcagcataccgaacgatcaatatcgtaggtactttgagcttgctcaagaaagcatctgctgctcgctgcgctcgtgtcagttacaaactgttcgacggcagcaaagccaactttactgatgatctcgaactgttcgatcgtctacttgtcagtgagccactgcatgccagccctgctgagcatcaggcaacgcctgatacttacaaaaagcataactggcgaaccggtgaatcacctcattgggtcaacccacggttgcatggaaatttccgtgggtggaatcaacatcgcaagatgctacctaacgaatacgtcccaggctaagtcatgaagatcgacaacattgattttatggaattctcagtcaacggtaggtcacacaccgaagctgtagagtcatttgcagaaatggtagaacagtacaaaaaagactgtgctagtgcataccactttgctatgaaccctgatccagaaattcaatggggtttgattcaagtaggctgtgctcttgcaaatctcacagtgataccttttgaacaagtgagcgataagcgttcctggttcatgcgttatcgaatcaagcgaagcgacgatagtcccattgaggactatttgtttctgagagctgatgactacatgcggttcctatagaccctttgtttgggttaaacccccttcgcagtaatgcgttgggggttcttttttacatcacatttttggaggttatagtggaagtcgctaacactgaccgtaaggtcaacgctgcactcattggtagtgccggtgaatctcatgcggtacaggttgcgggcactcgtgaattcatcgagatgctatcttcgaatctgtactctcgacccaaggaagccatgatccgtgaggttctctgcaatgcagatgacgctcataaagaagctggctacacaggtccaatcgaaatcgtcatcgaagatgacaacacactgatcatccgtgatcgtggtctgggtattccccacgacaagatgcatctgatctacggtacctacggtggatcaaccaagaagaaagacagcatggccactggtggcttcggtcttggctgtaagtccccatggtcctacacagatgcattcaccgtatccaactgccatgcaggaaccaagacgatcaacacgatgctgcgagtaagcaacgatcatggtggtctacctgcgatcattccgattgccaacttccctactgatgaaacaggactggaagtccgcattgatattaaggcaagcgatcttcgtgagatccgtagtctgatcatcaatgcagtccaccgtggcggcatgaatgcaactctaaatggtgatccattggagcgcatcaactatcccgaagatcagaagtacgtgttcgtggagaacagtcaccttggtcatcagatcatggtgaagtatggtgctgtgctctatccagttgatgagcaagatgtctatcgtgaagcctacaagctgatcactgagtacttgagccataaccagacactgatcctcttggctccagcggatagtttgatcatctctcctaaccgagaaaacgtttcgtatcttgacaagactcgtaagcagctgtacttgctgctgcgtgacttcatggaagagatcaacaagcgtgcagaaccttatgcacgcgaactgatcaacagaacgaatgttgctgaaatcaaacactcaaagcttagctggttgcgatatctaaataggattgattggattagtcataacttcatcaatcatggcaagtccaatctcgatgtgtttggtcgagtgattcactcgatgctgacgcacagctatccgcatcacttgcataaaaccagtctgaaacaacgcttcaaactcagtcagcaatacgtcagtccaggctgggaacaaatgatgcttttgaagttgagaactgaagcactcaaaaattcaagctcacacagcaacagctttttcaagcaagctgtgtttcgtttcttgagcttgactcgacgtctcaacatcagccctagtcaaattcgtttcggcgagcgtgagcaaatgtacatgcgagggccagagtacaacaacggtcgctttactagcatgtctgttcctattcaagccttcagatggaagtctaacaaagacttgaatgagcaagctatttggctcagacctgctgtagtgatcagtcacaccatcaaaggaattgatgagtcaaacgtacgtaattcccacgaagcattctttgctatcgtggtgcctcgtacaggcagtacgcattgcagcatcgtagatctgattgcttactttaccaaagctggtttcactgttaaggatttgactcctgatcagaagcttgttgctaaggttaaaaatgatgcaaaggttatcaagtacccggtgcttggtacattgcgtcgtatcaaagcaaccacttacggcgataagtacattctggaaaaagcattgtctttgaatcttgaagacactggctgcgagaagcctttggcttacatgaagattgcttcacgttctggtagctatgtcacatcgccactaggcatgagagacgatgactttcatgtcttccaaccactgctaccagatgacactgcaattgttacgaccgaagctgaagtcaagaagctgaagaagttaggtgcagtagactatcgtgaagtgatttacaatgtagttgctgagatggtcagtgatccaaaggttcgacaagcgtatgcttggcgtccaaaggatagtggtcacaatcaacatagccgctcgatatacaagacaatgttctatctcaaaagtgcttggtatcgggaaaatttccgcttgccagaaatcagctatgacaaggagatgaaacataagctcagtttgctttatgcatttgattcggctgctcattggttgttcgataaggactcaccacttgctgataaaaagaacatagcaaagcttttgttgaaaattcgtaccagtaaagaaccatggaaggtgaagtacatgtacgacttcattgagaagaacccaatgttccagggttctgtcaatgtcgatgaaatcttggacctgcaatcaaacacaactgacaccaagcttcttacgaagctggatcagatcctcaaaatcgttatggagtaattatgaaaattacagtcgtagcagccatcctgaaggatgacagccttacgcttgttaccaatgaaggcaagtatcacaaacttgctcaaggtgacaatcgtctccgccctattctcgacttggttctgccggaagtacaagccggccgttctatcgaagtggatctcgctggtgctatcaccaacgcttatgaagacttcgaaaagaagtcgaatggcgtgatcaagttcttccgcgttgctcgcaatgcattgaagaaatggttcggcgacaacagccttgctgtttcggatggtacctatggaaccattccggacacgccggctgaagtcgatgagatcgttcagaagctggaagctgagccagagactcgtgagcagactctggaagagatcatcgccaattcgaagcctgtgactggtctggtgtttaacaccggtacccaagacaagcagctacctcagcatgagactctcattgctgttgtggatggcaaagagatcattccgaatgcacagcatctccatgctcaggtggctcatgccagcaagctgggtagccctgctgcattcgagaacttcgctcgtctggtgacggcagtgaagcgtcagcactcgatggatgatctggttgctttcatcagcaagcttgatacacctctgactgatgaaggttacgtcttggcttacaaaaacctgtcagctacttctgaagttggtgtgtatgtcgatccgtacaccaggaaggtcaagcagcgtgtgggtactcgtgtctgcatgagcgaatctttggtcgatcccaatcgtggtcaggactgttccaacggtctgcacgttgccagccggtcttacctgggtagctacagcggcagtggtggtacgttcttgattcgtatcaaacccagcgatgtcattgctgtgccgaagtacaacacgaacaaaatgcgcgtctgtgcttacgaaatcttgggtcgtctgagcactgaagatgctcaagctgtgtgcagcaaccgtccaatgcaaactgacgaaggcaagcgcctgctggccgcagcaatctccggcaagacagtggcaatcaccaaccaagtcgagatcactgcatctcacggtggcggctgtgtttacactcagctcggcgaaagcaatccaggtcgtgtgttcgaacgagattcgttggaagatctgggcatggtcgatcctatcgatccagatgcaccttccgatcacacggctgcacctgtggcagtcgaggaagtcgccgaagtaatcgagacgaccaacctgactcgtaaggaagcagctgctgtgctgcatgctgcatgggccaagctggtcattgatggagcagatgacatcctgacagcagaagcctacaggcagctggtggacttcaagcagcgaaccaaggtctcttgggcaaagctgggcattccgcatcaaggcaacaccccagttgctgacttcgttcctcctgaagttacacctgccaaggttgctgagcagttcaatcaagcagcagcaccggaagaacgtgacgaagaggcagatgccgaaaaactgaatgatctgttcatgaagttcaacgtagcagatgctggcggcaaatctgagtacgaagctggaaccgagctgatcaagctgttcaaggactatggctttgcctgggacgaagacggtgacaacatgcttctcgacttcgacgaagcagacctgggtagcgtcagtttcaccgtggctaactatgaacaggctcagcttcgtgaaaagttggcaccgtctgagaagccttctaaggccaatgaaggtgcagctgccactaccgtaccggctgatggtggaacgcctcgtcagcgtatccgggcgctgcttgccaagggtccactgaccgtaggcacggccaaggaaatcctggctatcaagaaggcagcaaagaagggttggtcagctcttggcgtcaacggtgaagagtcgtacgacatcgagcagcaggccactggtcagtaaggttcctaccaagacaccctcagttcaagttatactgagggtgtctcaatcacaggaaccaaggggatgagtaacgtccttcgtgtcaaccgcaaggctaccgatggcgatatcgttcgcttgaatgcctgcggattctctctcaagaccatcggccagatgctcggaatccatccgactactgtcaccatccgtcttcatgctctcggagttcctcctgcggatactcggcgatccttcatggaagccgttttcgcggggctggactctgcacagcaggagtggctggccgatcacctcaacgctggtgtatccgtcaaggactacatcaccaaactggttatcaacgcacatggacaacagcaacaatctgctggcaacactcaactggtttcggatagcgaagccgagtccgacgcagcgtgacatcattgtccagactggcgtgcactttgaagaagtgaccgaacatctggacactgtgacaggcaacgatgtggaaacatcactgctggtcatggaagcaaaggatgcactgaagcgtctggctgatcatatgaagagtgaaccaattcgctactcataccagccggaagatcatctcgaactactggacgctttgtgcgatcagaacgtcactggtgtaggcattgcttacatgctgggcttcgaattcaatggtgcaatgactgaagtcaatggctccaacttctccaagttcgtaaacggtgaagcaatctttaccgagcaaggtaagattgccaaggggccggacttcttccgccccgacctcggaccatatctgtaaagcaactaatgcatagcccctcaatagaggggctttctatttaacggagtgacccatggaaacacctcagcgcctacccctgaaccagggacagcaagccgctgctgacggcttcttcagcttcctgctgaatgatcagcaaaaagaattgatcatcagtggtccgggtggagtcggcaagacgttcaccatgggtcacatgatcgatgaagtcatgccgacctactacgacgcatgtgacttggcgaacatcaagcccaagtacaacgaagtcgtgatgacggcaaccaccaacaaagctgctgccgtattggcagaagctaccaatcgtccaacgcagactgtgcattcattctttgacctcactgtcaaagaaaactaccgcacgggtgaaacagaaatccagcgtaagcgtaactggatgatgaaagaaaagaagatcatcttcattgacgaatgttcaatgattgatcgtgagctgtatcgtgaaatccgagacggctcgctcaatagcaagatcgtctatgtcggtgatcacagccagctggctccgatcaaagaaccaatctcaccgatctacaatcagcgtctgccgttctacgagctgacgcagccgatgcgtacgaacaatcctcatctacaagcgctcaatcagcaactgcgtaacactgtggaaacgggaatctttcatcccatccacttggttcccggtgtgattgatcaatacaacggtagtcagatggaagaagctttccgtcaagagttcagccaacagactcgtgatgcacgtgtcatggcttacaccaatgcacgagtaattcagtacaacgattacattcgtggtcttcgtggaatcagtggtccatatcaaccgggtgaattgctagtctctaactcagctactcagctgggagatggcatggcattgtcagttgaagaagaagttgagctgatcacttctactacaactcctgcacctgtgcatctggatgatgatgcaaccatcgatgtttattacgtcgatctggaatctgcttacggctactatgcaaacgtcatggtgccagctgatcgtgatcactggaactcgttgatcaagtggtatgcacaacgtaaagactggaagaattatttccagctgaagaacatgtatgccgatctgcgtcctcgtgatgcatgcactgtgcacaaagcacaaggtggtacctacaagcatgcttacatcgatctggatgacatcagtcagtgccgcgatccaaaggtagcagcacgactgctgtatgtggctttcagccgagccaaggagagagtaatcgtctatggagatctggctgaaaagtttggtggactcgtgaggtgatgtatggctcgaaagacatcagtaccgccaacagtgatgttcagcgttgaagttcttgaagcattgcatgcaccagaagaacgccgtattgatcgtgagatatctgagatcaatcgactcaatggtgaaatcaaaaagatacctaacccaactggctatgcctacttgggtcaggtgtttacgacacaagagttcaaacgtattgctggcaaaaatggttggccacaactagacacgtctctttgggatcgtgctcatgatgtgcttgaagatcagaaagctgtgatggctcgcctagcagctgtacgtcagtacatagcactggtcctgaccacaagcatgactggtgaagatcgtcgtaatctgattcctgattacattgcttcattagccaatgcgacaatggacattgctcgtaccaaagatatcgaagaagtcttacctcgattcccaaagatcgaaaagcaatacagacttgttgaacaaacgatggctgtcctggcagcagggcaactgatctactaggagttgccatgcgctatctgacttatcaagagcacacacgaggatatccggtgtgcttcttggtacctgctatcgacaaggatgcaatcaagcgtgagtacatcacgccattcaacgttaaggaagaagacgtattagtactctcgttgcatcagagtactgaaaagaaaaaaactccagctgccgaaatgaaagagtacatccagaccatgctggctgaggtactcactgacagctatgtgcaatacattgttgtcaacgacagcgaatacttcaaggtactgacgaagagtcagtcctctgaagcaagcttgggatacgtcatggactgtgtatacggcccatggaaagtcatctacgtcccaagctttaaagcggtgttctatgatcctgtaaagatcagacacaagattgccatgggcatgaaagctttagttgatcatcgatcatctgagtacaaagcccctggttcagaaatcatcgagttcgaacactatccagaaaccaatgatgaaatccagttcgcactggaaaaattattggagatggattgtgacctcactgcggatatcgaagcattcgacttgaagcatgacaaagctggtatcggcacgatctcgtttgcctggaaccaacacgaaggtattgccttcttggtggattggaaacaactcagtacagagggaccaatctttggtgccaatgtaaagaatgatcatgtccgaggactgctggcagacttctttaggaagttccaaaagaccggtcgtaagatgatttggcacaacatcgctttcgatgcctacgtgctggtgtatcagttatttatggaacatctgatcgacacagcaggtttactcgatggcttgaaaatcatgctgaccaattggcatgacaccaagctgatcacctacctcgcaacaaatagctgtgcaggaaacaagcttggtctgaaagagcaagccttggagtactcaggcaactatgctgtcgagtcaatcaaagacatcacaagaattccaaagcataagttgctgaagtataaccttgtcgatagtctttccacttggttcgtattcaacaagtggtaccagaagatgatcgatgatgatcaactggatatttacgagaacctgtttcaacccagcattgtagacatcgttcaaatgcagttgactggtttacctgtcaacatgcaaacagtgcacaaagtcaaagtattgttagaagctgacgagctgaaagctcgtgatcagatcaacagtactcaagtgattaagcaatacaactatcgtcgtctcgaagcttacgttaagcgtaagaatgaagagtggaagaaaaaacgtacaacgattgctgagacacttgaggcaagcaaaacgaacgagaagatccgtgaggaaattacgttcaatcctgactcaccaaaccagttgcaagacttgttgttcaacatgctgggcttgcccgtcattgaactcaccaagactaagcaaccggcaacgggagccaagacgatcaaagcactcctgaatcacacgaaagatcctgacgtgttggagttcttgaacggcttgctggactttagctctgtcaacaaaatcctgaccagcttcatacctgcattgctcaatgcatcacaaggtccggatggttggcattacctgttcggtaatttcaatctaggtgggactgtctctgggcgtctgtccagtagcaatcctaacctgcaaaacttgcctgctaattcgaagtacgccaagtacatcaagatgtgcatcgaagcacccccaggctggctgttctgtggcctggactttgcatcactggaagaccgtatcagtgcactgacaaccaaagatccagagaaactgaaggtatataccgatggctacgatggacatgcaatgcgagcattcgcatattggggcgatcagatgcccggtgtggttaacactgtgcaaggcatcaatgccttggcagacaagaaacatccgtacttctatctccgtcaagcatccaaggctccgacctttgcactgacctacgcagggacattcaagaccctgatgaagaactgcggtttcaatgaagaggaagccaagaaaatcgaggccaacttcaagaagctctacgcagtttcgatccagtgggtcagccagaaacttgacgatgctagccgcaatggctacatcacagcagcctttgggctgcgtgtacgtacacccctactggctcaggtcatccgaggcaacagcaggacgcctcatgaggctgaggcagagggtaggacagcaggcaatgcccttgggcaaagctggtgtctgttgaatagccgagcctggaaggaattcatgggcaaggttcgtgactcagagtacaggctggatatccggccctgtgcccagattcacgatgcaggctatgccctgatccgagaggatctgggtgccgtggcctacgccaacaagcaccttgtagaggcagtacaatggcaagaccaccccgacatctggcatgatcaggttaagttgggtggagaactcgggatcttctaccccaactggacgaccgagatcacgattgccaatggggccaatgaggaagagattttctctaccgtcaacaaggcactggcggcgtaaccttccatcagggaaaagccatgtgcaactgcaattctcagactatctgcttcaagcgagggtctaccttcgctttcatgtttgaggttccagcagaagtaccagacggcttctttcgtaactggctccctaaagctcagttgcgaaagagccgatctgattcagaacgaggtttgattgcgaacctcgcctgctactggaacgacgatgtaaaggcacgacaagtcattgtccgccatcttgaaactgatcaattcccattgggtgaagctgagttggatatccgacttgagtcttccaacggtgaggcgattcacaccagcaccatcatcatcaaaatcgaacgaggcatcaccaatggctgacatcactcccaaggcgttcgacggtatgacgttgagccttgtcgctgtacctctgaagggtaatccaggcgagcagggtaaaggtctgcgtggtgatcctggcgatagcaattatcagctctggctgaaggctggcaataccggaagtctggaagacttcctgcttgccatgaaaggcgagaagggtgcagacggccaaggactgaccaatcgtggagattgggaagttggtctgtatcagccgggcgattacgtcttttctgctggtactcaaacggcgatctctatgtggatctaccgtggaagcgaagagttcatctcactggttccgccagatgaagacactgacaactggattgaatttgctgctgataccggcaagccaatcgagttgcgcaacaatggcgagaagatccaatggcgcatccaagatgcagctgagtggatcgatttgatttttgtatccgatctccgtggacctactggcctcaaaggagataagggtgacaaaggcgatgcaggtactggcttgaacaatcgtggtaactgggctgctggtacttaccagccgggcgactacgtattcgcagcgggtactgttgctgcaagctcaatgtggattctcagctctacgactgattacgtatccaacactgctcctgcaaatgatctgactcattggatcgagtttgctgctcctgccggaccggctggtgagcaaggtgatgatggactctcagtcaatctacgtaagacttccactgcaatccagtatcagcaaactggtggtccctggactgaccttgttccgctgagtgacatcaagggtgataagggcgaacaaggcattcaaggtgtaaagggagacactggtgtaactggtaagtctgcctatcaatctgcattggatggtggattcgttggaaccgaaattcaatggaatgcatccctgaaaggaaccaagggggatactggaacagccggcaagtctgcctaccagagtgctgtcgatagtggtttctctggtactgaagcacagtggactgcttcgcttaaaggagccaagggtgacaccggtactcaaggtattcagggtatccaaggcgtcaagggtgacaaaggagacaagggtgatactggccctgctgccagttataccgagggtacttacgctgcacgtccagcccctggtattgcaggtagtacctactacgctacggacattcgtgagacctatcgttccaatggaaccaactgggtacttgccagcactggtggtgttgtactcgcatcggttgctgttgaagcaagcggtctgtcaaatgctaatgagattccaatcaccagtcatgactttggcttgactccatttgcattggttccgaatgctccatcgctcatcttcacttgtgggcagcgtccatttattgtgacgctctcaggtacgatgcgtggtggtgaagccaatgcaacgtggtgcgtacagttggaaatcaacggtactgtctacacgcagcttctcgataaagacagcattgcagacaattggaaagcagtcgttcgttcgaccaaaccactgacgtttgctgtcggtactacgatcacctgtcgtattcgaggtgttgtgggcggaagcaccaatggtgctctgttcaccaacccagctgacccacttcagattgtggcgatgtccgtatgatcctgactcgatcagttctcaatgaagcactgcttgtggtgactcctacgttgccacagagtggtccacctgtcctcatggttcatggtgccgagggtgatcccaacggcgcctgggcgtggagtcagtacgacacacgcaccaaggtgccacgtggctgtctcgacgcagggcgtgtcatacacagccctgagttgggtggtaactacacctggggcaatgccacatgccaagcacgcatagatacagcctatgctcgcatgggcagccagaagatcgtggttgcctgtcagagcatgggtggtcctggtggcttgacttggactgcaaacaaccccactaaggtggcaggagtgatcctagtcattcctgtgctggacttagctagcattctgacaagcggttatgcatcagcattgaatgccgcctatagtggtggctacagtgatgcaacctacggggacttcagtcctgtcgttcgtgcacgtcgtggaacttttccagcagtaccaattcaactttggtatggaactactgactcactttgtttgcctcagtacgctgaagagttcggtgcactcaccggagcagagatgcatccacttgtgggtggacacgaagagagtgtagtgaacatggtcagtgcagctgaagtgacacgattcatcaaaaatctttgattcattttttctggtgtctaacaccaacaactggggagcgaatgctcccctttctacctctggagaacctgatggaaaagaaacatttttacgtgctctgtgctcaagtcgcttggcgtaccagcgaagattctgaagcactgagcgtgatgcctgtgaacgttgttgcatcgttcccatcgccatacattcgcaagttcaatctggcacaaatgaacgctcaggcaatcaacaacctgagccagatgatcggtgaacgtgtcaacccggatctcgtggccggtgtgaccatcatgaacatttcttctctgggctacatgaccgaagaagagttccatgctcaaccgactcagactcaggtcgagaaggaagttcgtactgtcgtgagtgaagcacaggatcagagcgagcgtgcctaatggcattcatccacgctactgaaatcttgcagatgagtgctgatactcttggtcagcgagcagctgatcgagatgtagttgaagaacggtcaatggctaaggtcgttgctctgttcaacatgaagcacgatctcaatctcaccgaagcacagggctggaacttcatggtcacactaaaggaagtccgctcactgatcggtgacacgttccgtccagatgattacatcgacaacatcagctacacagctcttgaagctgagtgtcgatctaagaagctgtaagcaaagtcgcagtcctttaccggggctgcggctctttttatttgacatagagccaacagtgaacaccatcaccaacagaacaggcatcccattgactcttgcagtctgggctgtccatgacgattacgacttcatctacgatgaaaactacatcagtgttaccacgctgatgaaacccattcgacagactgtactaggattccgaatcagtcctgaagagagacaacaacttgatgctgctgatctcatcagctcatcctggggatctgcccttcatggttctgtagagaacgcatggcgtaactatagaatcaatctgaagaaacttggctatcctcagtcagtgattgatcgtgtacgcatcaatccgaagccagaagaaattgcagcagaccctgacatcattgctatctacatggagcaacgtcgtagtcgtgttgtggctggttggactgtcggcggtaagttcgacttcgtaggcgaaggacaagtccaagacaacaagtctacaactgcctacacatggttctatggaaccaaggatgaggactacaagctccagctgagcatgtaccgcttcctcaacatggacatcatcactgaagaaaccggtcaagtgaacttcctgttcaccgactggaagaagtctgatgcccgatccaatccgaagtatccacagagtcgcttggaatcaaagacgattcctttgctctcaatcagtgagactgaaagctggataatcaatcgtctggctcagatcgacaagtaccgtgcaacacctgaaaaggaattgccacgctgtactgatgaagaattgtggcgctctgctccgcaatacaagtactactccgacccaactaaaacggacggacgttctaccaagaacttcgatacgctgcatgaagcgaatcagttctggaaggtagacaaagctggtaagggtattgtcaaaacaatcccaggccaagtgaagcgctgtgagtattgtggagtcttcaatctctgctcgcagaaagacgaatacttccccgaaggactaccaacatgatcgatctgtctgacgtacagcatcacatcacagtcgaagagattgtcgatgtcctgtgcaacaagactcaaaacactgaccgtggatttttccgtgcaaccgtcgtgttcttccttgcgaagatggcaagctgtcagcgtgccactgtcgttacgaaggatcgtggtgcattgcctgtcaacatgtacacccttgctctggccacttctggctacggtaaggggcactctgtaggcatcatggaaaacgagttgatgcaagcgttcaaagaacgtttcacactcgacaccatgccagtgatctctgagcaaacacattgggatctcgctaacaagcgagcactgcgtaatggcagtgatcccaatgatgaattcgaaaaggtcggcagcgacgctatgcgtagcggcaagatccctttcactttcgatagtggtaccgtcccagctgtaaagcagttgcgtcatgcattgctgctggcaggctgtggtgccatcaatcttcagatcgatgaaatcggatcgaacctgatcggcaatgttgagctgctcaatctgttcttggagctgtatgaccaaggcatcgtcaagggcaagctgaccaagaacactgcggagaacactcgcagcgaagagattgatggtaagacaccaaccaatctgttgctcttcggtacgcaaagcaagttgctcgatgcaggacaaactgaggatcagttttactcgttcctcgaaactggctatgcacgtcgttgcatcttcggcattggctctcaagatcgcaaggctttccatagccagagtcctgaagagatctaccgccgattgatccagccgaacaacaatgcgtcagtcaagaagtggtctcagcacttccacgcactggctgatccagcgatgttcggatggcagatgaacgtcgatgatgacgtgtccatcaagttgcttgagtacaagatcgcatgcgagaaggcagcagacttgatgcctgagcatgaagagatcaagaaagctgagctgtcccatcgttactttaaagcactgaagcttgcaggcacttacgccttcatcgagcaatccactactgtggagatgggacatcttctgtccgcaatcttgctggtcgaagaatcaggtttggcatttcaatcgatcttgaatcgaaagaaatcctacatgaagctggcagagtacattgccagtgttgaaggtgaagtcactcacgctgatctcaatgagcaactgccgttctataagacgggtgttggcttccgtaacgagatcatctcgatggctactgcctggggctacaagcaacacatcatcatcaagaagcgttttgaaaacaacattgaattcttcagtggtgaaaccctgaaggagacaaatcttgatgagatcatcctgtcgtatagcgatagctttgcctacaactacagtgctgaacgtgtgccatttgatcagctgcatttgctgactcaagagcaaggattgcattgggcaaaccatcacttccgtgggaaccaccgagcagaagagaatgtggtacctgagttcaactgcatcgtcatcgatgtggacgaaggaacttcgctagtctcagctcatgagttgatgaaggaatatcgtttcatgacttacaccaccaagcgtcatcaagtggatggtcatgcagatcgattcaggatgatcattccgatcaactaccatctgaagttggaagcggatgactacaaggaattcatgaataacatcatgaaggctttgccatttacttctgacgaggctgcaaatcaacgagccaagaagtgggagacgttcgctggtggtgagtatcactacaacgacggtgtgatcttcgatgcactgaagttcattccaaagacttcgaagaacgagcagcatcaagcagagttcaagaagatcgagaacctcgacaaccttcagcgttggttcgctgcacggatcaatgagacgggcaaccgtaacaacaatctgctgcgttatgcgatgactctcgtagacaatggcctgccactgattgatgtacagaaccttgtgatctccttcaatcaaatgctggaagcaccgctcgatgattctgagattcgttctacgattctggtatcagtcggtaagaagtaccaacggagctaaccatggaacttactcagttcgaggaaaatgtaatcgtaatgcttcgtaagatggagcagaataatgaaacacctcaccgtcgtgtaatcctgattgactgtcagtcaagacaaccgctcattgaaattccttatgatgatcgtgggttcatttccaccagtgagccagttcagtcagaacagatcagtaacatgatggaatctgtcatgcgatcaagtgatgaaattattttgtctatgcgtaatacacaagcagaggcagaagaaaatatacagacgggaaagatctacgagtacatggtccacttcgttagtagttgattacctatgagtggatgacagttcttttgctggttccaagactgtcatccaactctgaaccaaggagcagagtagtgagtgaagaagaacaaatcgaggaagtgatcaatgatcagcttgtactgatcagtggtcaatccgctaccggtaagtccgcatcactgcggaacatccggaaccaagaacgctggctgtatctcggtaccgaggcaggcaagcgtctcccattccgcaacaagttctgggccgaacggatcaccgatccgatggacgtactgaactacatggaacagtgcatcgagaatcgtgacgccattgatggtgtgattctggactcgctgacattcctgatggatatgtacgaaacccagtacgtcatcaatgcagccaacaccatggcagcatggggtgcctatcagcagttcttcaagcagctgatgaatgctgttgctcggtttggtaagccagtgatcatcatcgcccacacgcttgacgtgtacgatgaatctgcaatggcaaccaagaccagcgtacccatcaagggtgctctgaagaacaatggtatcgaggcttacttctcgaccgtagtcagcaccaagaaggtgactgtcaaggaaatcgagaagcttaaaagcagcctgctggaaatcacggaagaagaacgcgaacttggattcaagtacgtgttccagactcgcatcaccgcgaagaccacaggcgaacggattcgttctccgatggggatgttcgacaagtctcagacctacatcgacaacgatgctcaggctttgctcgactatctccacaagttctacaatagctaacacagcgttgtagttgattagcaacacatctcaataagcaaaggaaaaatcatgtttcagaatttgaccaacgaaggtatggagcagcaggaagatcgtctgggtggtggcggtccgctgccgactggcgtctacaccggcacaatcaagcagttctatggcatcaagtctgatgccggtgccatgggtgtcgttttcatcctggacattgatgggcgtgagtaccgcgaaaacatctacgtcaccaatcgtaagggtgaaaacttctacaccagggacggcaagaagtatcagctgcccggcttcatcactgcgaacgacatcgctctctgcgccaacggtcagcagctcaatgagctggagtgggaagaaaagcaggtcaagcagtggtctgatggcaaggaagtgctgaaggctgcacaggttgctgttgatctgctgggcaagacggtcactgtcgctatcgtcaacaccctgaagaacaagcaggaaaagaacagcaaggatgactacgttgacgttgctggtgagcgtgccgagaaccacatcgagaaagtgttcgactctgagtcgaagcgtaccgttcgtgaagcaatcgacggcaaggaagaagctgcattccacgacgagtggttgaagaagaacgaaggcgtgcagcgtgacaagcgcagcatcaaggatggtggctcggcaggttctgctggtgcacctccgaaggctggtgctgcatcgtctgctccgacaacgagcggcaagtcactgttcaacaagaagtgatgaaaatcccagtgctaggcatggaccccagtttgcgtaactggggattggcagcagccgaattgtgtctggacactgggaatctttctacacctgtcatcagcattgttggtacgaagtctgatgacagtaagcgagtccgccagaactccaaggacttgcagaccgctgaagatctcgcagcaggtatcttgcctgctgcaaggttagctaaagcgatcttcgtagaagttccagtgggatcgcaatccgccagagcaatggcttcgtacggaacgtgtgtaggcattcttggttccatacgagcacttggtatcgagatcattgaagtgacgccgaccgaagtgaagacccacttcaccggtaataagaacgctaccaaagacgatatgatccgcacggccatggagtactaccccgaagcagcatggccgctcctgaaaggtaaagtggtagcgaaggctgagcacatggctgatgccattgcggcaattcacgcaggcgtacacacacctgtgtttcaacaattgatgcgacttctcgcatcctaatctcaaggaaataacatggcactggaaattaccatcgatcagaatgagatcgaaactgcaatccgcaatcacatcggtaccctgatcaccgtggctgaaggccagaacatcagcatcgccctgaaggctggccgtggtgaaaacggctactcggctaccatcgagatcggtggttcgaatgcaactgcatcggttgaaacgaagccggctgctgccccatctgtctcgggtccgttcaagcgtggagccaagccggctcagaccgacaccagcgctcctgtgggcgatgctccgatcccggagcaggatctgacccagaaggaagttgccgtcgctgataccggcgtacagacctctccggagcctgtcgatgtcaccccggctgaagagccggttgccgaaacgccgaagaagggtggcttgttccagcatctgccgaagcgtaccggtacggacactgaagccaactaatcggcctcaaccgtaaagtagaaagcccctcaatgaggggctttctttttggtcagttcaccagattgatccaaggattcaacagtggtgcccggaaggcttggcctaccccgacagagtagtccagggagccgtctgcaagcttcgcaaagaggttgtcctcgataggtagcccaacactaccaaacatcgtcggagccggtgcagcgacagccaggagcgaatgcagggggttattcctgatcatgctcagacccaccttggccgaacgtatcttgaagttccagaaccagagaagaccaatggattccaagtagcctcggaaccgacccggcagacggtcgtagttaacgaactcttccgtaatccggctcagggcgtactctggcgacttcttctgacgacgagtgatgtcgtcatagaggatcgccttagccacgaagtcaccgtactggatggctttctgcaagccttggtacagagccgtgtctttggtgatcaaggcatagcgaccagcagtgcgaacactctcaggcagacgatcaaccatcttctcgatgtaggcattgagcttgccagaggtcagttcgatatcgtcagcagtcatacccacatcagagatcgcagtgaactcgcctgcttctatcaatggccagatcgacaaacgacggtgagcatctcgaattgaacgcaactcagcattcaacttacgagtacccacgatatcgttgttggcttcagccacacgcaactcaccttcaacttcatccatacgaacacgagacttgacatagctgtcgatctcggctgccttctgaggatagccacgagcaacactcagcaatggcacaccacgaccaaccaactgatacacgttggcaatcgagttagagatcggaacaaccaccgacttcaccacgatgatcgtacgagcatcttggacaaagttctgaagcacacgttctgcattggtcacatacctataggctttgttaccaaacagaccaagtgccaacttcttcgcagtgtcagtagtctcacgagaccagcgagtattaccagtgaacacgtcaccagtcgatgccgaacgatagccgatagcatcgttgagcatgtccttacgaacgtagaactcttcaccaaacttcgacttgatgtacttacgggtctcagcactgaacagacttgctgcatcagcaattaccttgtcagtcctcttgtcgaacagatccacatacatctcttgtgcagtgctcgacgccttcgtgtcggattcgtacatgtcatgcagtgcatcaaccagacgctcattgaagaattgagccttcgcctcttcaacctgacgaccacgccagacaccaatcatcttggcgaagtgatcgtccttgttgagacgctgcatctgttgtggatcaactgcacgctcataggctacagcattacccttctcatcccagatcggcatcaaaggttcgctctgactggttgtattacgctgaccataggcagcagcagtacgactgatcaatgcaacttctgcacgctcagtgatacgaccagcaaccatggtgtcgtggctgaacccggtcacagcatccacaccgttagaggtgtgacgaacattttggaagatgccctggttgtaagcagcacgcccagacacgggtgcgtagtagtagcccttcttggatcggccacgctcaaggtaatcacccttgtagtcagcaacacgaacgtagctacgctcagccaacttggcaaactctttgtcctcagcaaccaacaggctgacacccggctgatcaagcgtagggatgtatcccttgaattggttgtactgagcacggttggtctgtgccttcgtgtactcatccttacgctgaccacgcaggtaagacacagcaaattccataccctcagcttcattggtgatcaggttagccagatcactgcgaaccatgggggtaagtgactccaccgcgtacagagaagtcagctgatcaattgcatcaacgacatcttggccaggaatcttccagctaccacgacgactctcattgaacagacgtgagatggccaatgcattacgcagcaagttgttacctgcttcacccgtcatcatgtagttggccaactgctgcatcttcttctgatacgtatcgaagttgatcggcgagtgattacgcacagtgtcttccaacgcagtgatgcgttgtgcacggtagttgtcatcagctactgcttgcagtgcatcggaatccaatgcagccaagtccgtcttaccaagaccacgatgcagcatagaccactggtccttggtcagctcacgcttgaacttgccggcaatgatgcccggcagatgttcgcggaattgctgacgatcctgttgaaccatggcacgaacagtcttgatcatgtcgtagatggtcgagttgttgtcagtacgaccaaccagatcattgaacagatcttgcagtggcttccagagattcgaacgattcgacatctccatgaagcccatagctacctgagcaccattcttctcagttgccatcttggccatgatctgagcagcaccagccagcatacgaccagccttggtgttagcacgttgctcagcctcagtcgccttgacgattgcagcttcgctcaacttctcaacaccatcaacgatgtactgattggcacgatcaaacacaccgccagtcttggaagcgtattgatccatggcactttgtgtgtcctgcatcgtgtcgtacatgtggctcatcagagcatccatagctccaccaatgtcacgagagttgctggtaccagacagataaccactcagcctatccattgcagtctggccggcattctccaacatgccatccaaagtacgaccatcagcacgatcagcctttggcaatgccatacgactcaatgcacgacgcagagtgtcattggtcatcgacaatgcaacgaacacaggcagcagtgaactacgaccctttgcatcagttgtggtcagatagttacccatgatgacgttgtactgctcctgcgcatagtaacgagcagactgaggatcaacaggattctcaggcatcaggtcatcaacggtcagcgtcttggtgacatgcgagaacagctgctgtgccttagccaaagcgttggcatccagatcaatgctcatcgtcatggcagtcgtcaggtgacggaacagtgcagcttcctgcatggtcattgggaacccatgagcattgaccatagcagtcagtgcgcttgagttacgcaatgcattcagtagttctttgcgccgactctcaccagtgtgtgggtcaacccgcacacgaacatagtcagcaactttacgcatgaaagtttgctgcaaagcagtcagacgatcgttgttgccaaacaatggattctggaacagagccgtatcacgaacgccatcagcaatcgttgggaacgaacgaatgatgacaccagtgttgaactgaagagtgctcaatgcatcgtcagcaattgctggtgctttctttttatcccagaacaattgcttcaggaacttgacaacatccttggccatttgaaccaaggagggtgattgcttcgacttgaggttctcagtcagctgttcattggtcagtgcccaagccatgaactcattgagtgccttagccttggccacagcatcagtgacatcgagatcagactgggcttcagtgatgacagcttgtgcagtagtcacagcaacgttgttgctcgtgtcctgcatgaactgatccatcaaaccttcgattcgagtaatagcatcagccacttccggagacgaattgccttcgtagtgagcaagcaccttctcgaaagtagtagcgtgcacctgctcatggatcaacgtttcaaccgaagcgttgtagagatagatggtcttgtcagcaacgacagttgcacccagcttgtcctgcggagtgatgatcttgcctgttgcattctggtagtcagcaatctgctcggcagtaccgaacacgacttgccagtccttcatggactgagaacgctggatttctccgaagatgaccttctgtgcatcagtcatctcagccatgcgaccaaggttctgtagtgccgtgtaggacagcacacgtgcaccagacttgtgagcacgacccacttgatccaagggagctgatacagcagccggtgccttcggagtgacagtgatcacaccacgcttatctcgtgcagccttatacgctgcctgcaatgcagccaatgggtcatcgaccggagcaataccattgctgtagggagcaccagcagcagccatctggtcaactgaattggccacagcctgacgtgcagcgattcgatcagcagcagattcagcagaccacttgagattcagacccaagtcttccatcgctgcttcaacagcagagggagtgcgaacttcgttacgctcaagtggaatacccaaagcacgatacagatcggccagcatctcttcggacacattctccatcgacacgttcttagagaacttgacccatgagtcattgacagcagccagaggattaccctgccagctctggtatacagcctcattggctcgacggctgtaatccatcagacgactatccagtgcgatgttcataccatcgaacactttcagagttcccttgagtttggcattggccaagtactgcatcatgcgaccatcgcctgagccaatggtcatgaaagcagcaccggcaacaccagcattcgctgggccatagatataggcatcagtgctcatgcggctggccttactcagaccacgaccaaactctgacgcaccaacatcagtcttgctggatgcagcaatgtagaaacgctgtgcaccggtatcgatcagtggagccagagtctccaacttcttgtagataccacgcagctcagcttgactcaggaactcagtcttcttgtagttcggatcagcagcagctttgctttcaatggcagcagcaacttcacgcttgaatgcatcttccaggaagatcgactggacctgagtagcacgacgaaggatctcaacagccttcatcatcggtgcaccaacagtcgcagtgatgccttctcgcatcggagcaacaaacagatgcagcatgttctgctgaatgttcttgatctgatcagagttgaattggaactcaacaggataagccatatcgacacgcttcgtcggagcgtcatcccacttgattccgttcttggttcgaacaggaaccacagaagttagctcatccatagcagcatagaacgtatccaacttctgctgtgcattgacatcattcacaccgaacatggcctgagccatggagatggaactatcagccttctgcatcgtggcaacagtagacagtcgctcatagatcttcttgatcagcgactgagtgacattgcctgcaataccattcgcaccagaaccatagatggtaatggtgagtggattcttcagtgcaccgcgacccagagtcagtacaccagtctcgttgtcgaaagtgatgtcattaccaaagaacgcatccagcacagtaaacagtcggttgatctgatcagtaccgtactgatcatcagccagttccttacgcagtgagtccacagccttggctgtctcatccgtagacgcttgatagagatccttcgaatcaatgctagaacggatctcattagcagtcgttggtgcaccaaaggtgacaccacccttacgcatgttgttgacccactgctcactgaagtcaccaatcgtcatcaagcccatggcattgatcggaccattggtcataccgtctgcttccagatacaacgaagtggtgaactcgccacgattgctgtcatcaagacgagcgtactcactcagagaatgcaaagcagccggagtcatatctgcaccaacagccttaaaggtgttgagcagagtatctacgtcagtctcgttaacgatgtggctacctgagttcaacgactgaagcaggctgattgcatcacccatcgaagcaagcatgccttcgatctttgcaatggcagcaggccgctccatgttatggaccttgacaccaaagtgctgaccaacagcaacaatgaagttgccatactgatcggggtcattgagattcaatgtggcacgagtaggcaggattgcctcacgaacaaccttgctcgattgcgggctgtacttacccagcatctgcatacgaccaacacgggacatgttgtaacggtaacgcacaggcatgtcagtgacatctcgcccagcagcctgagcaaggttgttcacttcgccatacacacgagccagggaattcatggcagcagtgatcgtacggttcttaccctcaaggctggctgcatgtgccttgtttagaacctgaccaccgacattgcctgcaccgaacagacgctgcaatgcacccatacccagaccggtatagacattgatcatcgtctggttgacatagaacggagttttctgttcttcacgcaaagcagattgctgatcctcagtgttttcaaccagaggattgttcatctgtcgcttggcgacttccatctttacatcgtcaccaatgaagttgacttcctctggttcaaccataaccgcatgctcaattgcattcgggtagtcattgattccagttgggatagcatcttcagcgacaacgtagcgattgaaagtctgcttgtgatcaagtccgtgacgctcatccaaagttacgttgacaacattcaacagcttgttgtccaccattgcctggatgacttcagcagccatcgactcaggaatgccttccacataacccagtggtgcattgctgttagcagtcaatccccaataggacttgatcttctgagccagcgttcgcttagcctcagcagtactcatgccctggttcagttcttcgatcagatcactgtcaccaagagcatccatgttcaagccggtataagcctggaagtcttcagccgtcatgtcttgcgtatagacatcaccgttaatcagccaatgcagacctgcaagcactgcgttctcaaccaagttttggttgtacgtcagcttgccatctacgttgtcagtgatgttgatcagcttaccgtcaagccaagtgttgacatcagactgaccgctcaggaaacgaccaccaacgttcttctcagagaggaaagtttgcagttgcttatccagactcttcttgatccagttcgcttcggaaaacagagtacggtagccgtcgatgacgtctacggtcacatcgtgacgcacagcgtcacccacatgccgaatgaagttctgcccagaggacagtgcttcttgaaccatggagagaggtgactcactgccgagggtgtgagtacgtgcctcatcaggcagcgagtaggcttccttgaatcgattcggatacttgtcggtctgcaccaagttggggaatacagcttccataccttgtggtgcaggctcagcttcagcagtctcaaccacatccggaaccgtctcttcagctacggtttcggtagctggctggggagcagaactaggctccacaacggcttccggttggtcaataacagtctcttcactggaccttgattcttccatgacaggttcagtttcagctgaggtatcatcttcctgcacctgcgttgcaggttcctcggtaggggccgagtccaccacgcgtgagttacgtcggaacgagtccgctacctcttggatcggaccttccagacgcgaatccaaggagaccgcaccaacatgaccaccattcaagttcgggaacgaatcgctcaggccgttgtaaacgttggccaacacttgggcctcaagcgcaatctggtgcgcttgctcaagggatttcgtggagcgagtgttaacgtacagcccttttgcggactgcttccacgtccggtcaggttgaagtgccatgtaggtgacaccatcagcgttcggattccccgcagcaaagtgagcgttgagcgccccgaccttgttctgcatatgctgcacgaactcgctaaagtcggtcagaagggcagcagcgaggttgagattacccgcagccacggccgaacgaatgcccttgtagtgcaccagggctgacttctcaccatcacccgtacgcatcgtatccgtggtgatttgctttgcaacaagatcctgacgacgcttcagacccagacgatccacagcttcattgtatgcacgttgttcttgcaagatcgtcttactgaaggtcaacgcagctcgctgatcaggagtcaacaccaaacgtccttgggactcttggtagaggatctgatcagcagtgttcggatcaagcttctggggtgcattctctgcaaccaccaaagcttcattgaccgcctgcttgccggcaggagtttccacattctcatcggtcacttgcggagcaatagaaccatcttcagctgcctgcatcttctgcatgacagtggtcagagcacgattgatcttcggcgtatcaagattcgccaacagtcctgcatactggttcagcagttgagcaggacgactctccggatcaagtccatccaagccagcagactcacgcatcttgaagtcctgtacggactgagccatgcgcagtagtgcgtaaccagcttcgatagagtccggcgtatcttccttcactcggttgacgaactcagccaagttctgcattgcctcaacacgattgccagcattgagaatcagtgggcgaatgttctcaccataaccaacttcatcgacttcagccgggttaaccgtcagctgattcatcagagtatctacgtaagagacagcattagctttctcttctggtgcaatgtcttgtgcatcaatagctgcacggatctcttcagcagccataggtgcttgagccacagcttcagcagcagcattgcctacaacagagtcagccaatgggctgctcttttcattttcagcaatgatgcgattgccacgttcaataagactattgaagactggggacaccacagccttcagaccttgcatcgtgccattcgctgccttgagtgcaacacgaccacttgcacctggaagctggacagtgccagcagcactgaagccatagagtgcaccttgaccaacctgctcaccaacaccttcagagagttgttgatccgggttgacgttctgttggatggcatagttctgagccagcccaccagtaccagactggataccttcttccagcggctcacgtaccaaagcgttagccaaggcagtacgcaggttcggcacatggaatgggttggactcgaaccgagcaaccaaggcaccagtagcagcagcaatcggagcctggatggcagcagcctgacgaccagcactatttgccagctggatacgtgcatcctcttggctcacgccagaggcgaccaattcacggaactgggggctagtacggttgagttcgtcaaacgactgctccatgacagcgttcgtcgtctgctggtaagcaccaccagcttccatagctgcaatggcagcaggagtggatacagcagaacctacacgctcagcaacagcggcagtagtagccagagacgcaccagaggctcgaccaatcgcctgagcgatgggagcaccaatagcacgtagacccttgctgattggaccagcacccaacagagaacccacagcatcagacgtaccctgcataaaggtcgtctcatctgagaggccgttgaccacagtattgactgcatctcgaccaatctgccggagtgctgctggaagctcccccatggactcacgttcgctttcgaactgtgcctgggagtctcggttctccaaagccgtgacggcctgtgtggagcgcctacgagcgttcagcacatcagtctgagtgccttgcacgaactcgttagcatcttgaatcttcccagatgcccaagcaccagcatcatcactgacagcaccgagtgccatagcaccaatgccagcaaaggcattgcccaagccggaaccaacaccagagatgatgtcagccgatgcctgtgacagattgcggttgttcagtgattggtctcgttggaaggcagcattgcctgccccctgagccaagatgagattggtagcattgctgccgtacttcgcatagatatccgaaggcagcatggtgcgaagatctgcttccaattcactcatcgtagctgcaccagactggttgccctgtccagcagctacttggtagaaatcgacgctgttcatgtcaggcgtcgcaggagcagcgacttgcgccggggctggcagcacagggtcactattgaccggggtgctcagagccgaacgcagaatgtcggtgatcgccatcttggttggagtccttgttagaggtaagttggtagagactacaataacagaaaaccccgccggagcggggtcttccttgttgcagtttacggtgcaccgaccggaatgaacatgtcttcattcgcctgggcttgtcggagaatctccgttgcccgattgaatgaaccccctcggctttctgctaccggctcaggctgcgtccgttggaagtcaggacgcagctgcggcagtgctcgctgcgcttcctggatagagtcaagttgctgacgagcagcttgaacacgagcctgatagcgaggcagctgagcacgaagccccggctgagttgcagcacgttgagtcattgcagacagctgtgacactgcatcgttgtaggtagcctgagcagattgcaatcgagcagcaaccgctcccgtttcctgattggaaacgaagttagtgaattgactgccgttacgcagactttcaatagcagcatcgatcccatcatcgttcaggcgtacaccgttaccgagatttgggctggaccgaatcggtgatagcaaacggttaactccgtactgcaagtactcagatgcagacccaggagcgttagtgatgtttcgacgaagtacagcaccagcagttgcagcattgacgttaccctgagacatcacacgctgaatttctcgcatgatgtcgccacggttcgaaccagagaacgaaccactctcaccgatcagttcatcaactacctgaccagcatcgcggttatctgcaacagttgtgccaaagtcattgctgatgccagtagcattgttctgcattgctcgcgtcaaaacttcggcagtaccagcattcgtctgcaacgcttcattggcacgaccgccaactgcttgaccaacttcagcttgtgaaatgcgttgacgcatttcatcccacgacaagtctttgtaagcacccggcttggagtcaggaagtgcagcccaagtatctttgaggttgccattcttgcgtgcatcgaagattgccttgccgatcttgtcctgattctcaggcgtgaacggctgactcttccaatccgcacccagcaccttcggaccgaagtcttcaagcgtgcccttgttgatttggaatgcacccaatgggctatgaccctgacgactgatcattccagcttggtgttggattacatcaccaatcgccatctgcgtgatcggacgtggcgttgcctggaattcaaacgtcgtgtcgtacgcactaccttgacgagtaccagcagtacccggagcagacacacttgcaccaccagcagaaggaccagctaccgctgcgcctgaaccaaggggaccatacgtaccggggaatgctgactgtacaaggcgagttgcttgagcacgaatgttcggatcaaggttcgccatgctttccagagttgcacgtgcatcttctgcacccgcagacatacgcagtacgttgttggcaacgacctgtgcttctcgggattcagtgtcattacgttgatcaataccaaggttgtactgatcacgcttcagaccaaactcaccggtgcgctgaccaagttcacctcgggtaagaccctgagtgttctgtgccaatgccatcgattgctcaggattgaggttgcgcagcagaggtccatagacatcctgtagctgcgtaacttcagcctgattaccacgacgtgctgcatcagtgatgcgattgattgcttcacgagcagcatcagtgcgggtattcgaatccacagtacggttgaagccatactggtcttgttccagattgaatgcaccctgttgcaatgcttggcgagtacggtcttggttcaaacgagaaccaacttgatcctgcaaaccagtaagcacaccagcagacaaacggttcgggttgataccttgcagcaacgaaccatcagccagtgcaccactcagcccagcagcatcttgctgacgtagtgcacgcatcaatacttcttgatcagcagctttagtctgctgactgcgaagcatatcgatggtgttgttggctgcgccaaatgcgttgttcaactggtcattgaacaactgtagcccacgcattgagctactgaagtccggaccttcgataggacgatattgaagagtagccatctgtattccttacccgcgagtcagacgattctgctcgacgtactgatcacgttctgcatcagactgaccttcaacaacagcacgagagcgagcacgatcagccagtgcagtgttgtaagtctgcatcgagttgttgaggttcgtattagcgaaactcttggtgaagttaaattgatccttagccagcttgttagcctggaatgcaccccacaaaccaccaagggtttgaagaccacccagaccaagcttaagggtatccatattccaaccaagacctgaatcgcctgcaccactttggggaggaacaaagccagcaccgttggctccgtagttggttgctggcaattccgccatgccagttggacgacccagaccatacgagcctgagaagatgtccgtaccacctgtgatggagttggtaccaaagttcagattagccagtgccgggtagctggactgccaatcttgtagagtcgttgccattggcgttgcctttacgtttgaagatttgtcgaaagagtcaggtctgcaaagttgcccagcatgtccaaactgagacctgagatgtcactacctaccatcagagtccgctcaaggaacgatgacggactttcagggatatagcctcgtactgcttcagtcaaggagagggggtcaatcacacccttgttcaccccgaaagcgtcggcataagcctgagcaatcgcctcagattctaccttataaccctcgacgatcttctgagtctctagcaggatatcttgggtagaggcgttcacatagttcgtgtaggcgttcagaccggtattggtcagtgccaacaggttctctgcccgcatcatgttggcaaacccagctgccatggactggccactggccatggcactaccaacgtttaagactacgaacgaggcaatcacacctacgatggcaccaatcttgtcaccgaacagagcagttgcagctcgctgaatgatcgataccagaatcatggcagcaatggcattgatcacagcgcccaccacaagggctgctacacctgtcagaccgacagctgcacctaccgcagcacttgaaccaaggatgccagcagcgcctgcgccagcaccacctgtgtagattgtgatgatgatgatcacaatgatcaggatcaccttgaacaagccagtctgataccacttcttcttcactacctgatagcagttgaagacaatgaagctacatgcagtagccatctgagtagacttcaccagaggcattgcacggtagataccttcatgcagtggcacgatgaaacctgattcgtcagtgtcagccaatgcatcagcagcatcgatctcaacagccttgcccttgtagatttcattgcgatgcatcagaccacggatgttcatcactcgatacgagttgttctcatcctgccaatagaggttgatgtcattgacggagatgttgtcgagaatcccccagatgccaccaacaaaacccagctcatcaaatagctcattcacccctcgactgaaccacaagtctcccttcttggctcccggcctaccaagaccattgtgctcagtctcaatgatcgagttccagctaatcgtgatgttgtagttcatcacgttgtttttgtcagaacggatcttgatttcgttcgtaggcattggaggatacggctgttgagccggttccggagtgccatacagaggattgctcgaatcagactgagcagctttccatgcagcccactgttgcatagttgcatcagctgctacccaggcaagcttccatgcagtgtaatcaccatcagtaccaacactggcagattcaagaatgcccttaaagaacctgtagacgtactcacggcaagcaacttctttgacgttgagtgacacaccgaacacggtgtaagcgtagtcgatgtctttcaggttctcgttgtccttgatcttttcgatcaagtcatcgtacttaccagtcgtactcttcttcagtgctttcttggattgtgcatagacatcaggcaagttcgtcggcgagacaaactcattgttgatacgaaatggaatgaagggaaagaattgctgatcaccggtgcgtggattgaacatggcatccagtgcagcattgcctgaaccacgacggtaaatgaaaacttgagcatcactccaactggactgaatagtctcttgagtatcaatacggtaagaccgttcaacaccaagattctcaacagtagttgtcgtcttagtagtcttggtaacaccaccaccaatgtcttcatcaacagacacgacagatacagactcagtgacatcacgagtctgatcttgatacatcgtcgattcaacagagtaggttgaatctgacccaggcttagtgcctttgaactcatccttcatgtagacacgatggatctcttgatacgtctcagtgcgagtcgtacttgattccgtgtgctcagcaggacgaccatcagagtaggtcacatccttttcaacatccgtcttcagatccacatcagtattgaccactgaattcgtgatcgattcccaaccatcgacagacgggtatggttgaccttgagccaggacgactgtatcgccaggaacaagtggttgctgttctggatcgtttgccaacaagtatgtggcatacaaataccgactcgtgtcaacgaagtcagcagcaacgaaggtataggtcacaacatcattgaagagaatacgaatcgtctgaccttcaatgtcagcagtccaatcttcattaattcgatcaggatgattttccagcatccagcgatcagcccagaaggtgtaatcagcatcaccaatcttgaccgattgaacttgaacctgctggttcgctgcatgaggcaattcgttctttagaacgttgacatctacagagttacctacagaaatactgccggtcacaagaccgacagtatccgtataaccagtacgacgagaccaacgagcaaagctacggaagcgaattgcaggaccattgagataactgtttgtgatcgtctgtccaagacttgtaacattgttcaagatcccaccaaagacagttgtcttcagataggacggacgctcattttcatcgccagccatgttgtagatgactgaactaacgtaggtcttctttcgacttccgaacatgcccattagacaaatccattctcagtcatgatcttgtccaacaccttatcgagattggcattggtgaaaccatcaggtggagtcaaaccttcatcaatggtcttcatggcaatccatgcatcaatgaacggacgacctgccttgacttcagcatctcgcttgtaactggtgatctgctgtgagtacagctcacgctgcttaccgacagaacctgcaaccgcagagccatcggtacgagtatcgagcgtctgtgcacgctgtgcttcaccttgttctttcaccatcagccactgtgccggcaagatgttgcccagattgtagacagccgtaccgtaagcctgatcttcagttgccagcttcatggtggtcagtgcatacgttgcaccagaagtctgtgcatccagaacaaccttggcgtactcagccttagccgtttgcgtttgaaccagagcagcaaatgcttgcagctgagcaacttgtgcctgccagaaagcttgatccttctgaagcaggaattgcgttgcattctgcatcacactctcaacgagtgaaatgtaagccttggtgtagtcaccagcagtaatacgacctgcctgatactccatcagcaagtgttgcttggcactcgacatcagcttgtcgaatacaccttcaccagtcggacaaccatctgacagatctttcagtgcgactgaaggaatatttttgaatagcggactgtcagcatcgacaggtagcttccaaatatcgtcattccaatcgatatcaggcaactggatattcagatcttggatgagataagtgaggatgctcttggcatcctgttcgccgttttgacgtgccatgtcttgatccacgtagaaagaaaaaagcccactgaaccaagaaggtcagtgggcctagtttactggcttccagtcagcttagccgacttccgaagtaccagctgcaagctgagcagtggccagctgcttgagttctgccggagtcagatcaggcagatcttcgatgccgaattcggttgcaagacgagtagtgacgatcacctgaccggtacccttgatcgtcttggttcggatgtccacgtacttgcgggctttcatctgatcatagatggcctgctcaatatgccaaccattgtcggtggtctcaccgaatgggacataccgcttgatcgcacccatgaagttgttgcctacagtgaagaactcaccgggcagatctcgcttgttcgggttgtggcaggtaatacggacacgacgcagcttggttgcctttgcacgtagatacgagtgcagggacacaggcttggcgggtgtaccttcagacgaagtttcagtgcccggcattggctgagcaaccttgtcagtaggtgctgcattgcctgacatggcagattgcagctgagcacgcagagtctcaagactggcgttgttggatggggtctgacccatcgtctttaggcgtgcacgcaacactgccttctcttcattgtcacgctgttccggagtcatatcctgcgggtccagcgattcggtgttctgttgttcgctcatggctgctacgttctcttgatgaaattgaagatggggagatcactctccccatcttggttccgctaccgattagatcggagcaacggtcttgatcagacccagacgttctgggcgcttgatcaggataccgtagtaccacttgatcgagctgaaaccagtctcgccatacggatcgttacggtccgcagtctccttaccaggagccttggtgatgaccgagaacttcacggtcttgccatcggtctggaagccgatggtggtgaacgcatcatcgccgacaaccagcatcgggaagatgtcgtagcgttcctcaccagcactgttcgtgctcgaacggtagccaggattggtaccaacttcggcacccttcgcagcccagtgcagcatctccggaacctgcacgatacggaacgcatcgatggtaccgatttcgccgttcatgatggtgccagcagaagcatagtgctggatctcaacgaacgccttgttaccgaacaggtcggtcatgcccttcagcagcggagccagttccgaacccacgtagatcactcgggtagcacccagggtcttcgtgtcgatcagacgggaaccggtgatgatggtggtctgcgtcggagtacgcagatcggtcagcgtctgatccagacgcatcagcagacggtagtccaccaacgaagccggaatctcaggcacagcaccagcagcaggaacaacttcaccggtgacttcgccatcattggttgcagcaccagcgtagaacacggtaccagccatcgacagcagatcggtctgaagcacagcttcggtcagctggacagcaccgttcatcagctcacggctcaaatgatccttcagctcgtcatccgagtcgaagtccacagattcctgggtccactcgtagaagaagccgaacttgtgcaggctgccttcacgttccagacgggtgaagccaacgcggttcactcgaccaccgttctcggtcagagtcggcagcttcgaagtgatcacaccgatgtccttcgacgaaccatataggttgccgttggcaatggtgacaccgtttgcgtcgataccctgatcgttgatgttgcgatcatccagcaacggaacgtagtaatagaccttgatcttcttgccgtagttcttcggcatgttggtgacgttggccagcggcatgaagtactgatcacgacgtgactcgatgatcgacttcttgagccacatgaaggtgttcatctggtcggaaccagcaccgtcgatgctcgacttgtcgccctcggcgggggcattgtaattcagaggcatgatcttcagatctcgttacacgcggcctgccatctgacgtaggaagtcgtcgtcggacatggccagaggattgatgggagaagcagcagcttttgctggcgtactgcgggttacagccgcagcttgagccttgtccgatacagtttgctttgcaggttgagcaacagtcttggcgacaggtgccggtgcttgcttgaccggttggtgggcaaccgtagtctttgcagcttcggcctgagccaattcgttacccacttcccggtaagcaagcaagaacggagtagacacaggaatgacaccgagagtacgacgacgattcacttcattggcaataacgtcatagacgccactgacacgatgttcgtggatggtacgcagcacagcaggttcattcccaaccgcatcgatactggcttgatcccacttcagagcctctgcaatggtttcttttcctcgatccattgattgaagttcatcaaccgtggattggaaatctacctgccgatcactgacgcgatgattgccaccttgatacgtcgattctgcatcaacatcgatgtctcgcggatcgatgccagaatcctttaacagcttctggattgctgccttgtcacctttactgaggtcaatcagaaaggacaactggctttcatccgtcagcttatggttttgcagcatggccagaacacgacgatgcggagcgagttcctgcatcttccgggtgtagttagcacccatctgcatcagctgctttacttcttcaggacttttcagttcgactttgcgcccattcgcagtgaatggcgccataagcttttcatactcagccttgtaatccgggggagtctcggtagtaccagccccctcagcaacctcaccagtaccggaactaccggtagcgtcaggattgctgttggcctgagtgccctcttccttgaccggaggggtagtctcagaaccagggggaggaacagtgccgtctcccgtatcggacggcgtgacattaccaccttccggtgtgccatcgccagtgttcgtattctctacaacttgttgagtttcttcaacaactaccggatcagttacttcttcggtggtctgggcaccagcatcttcctgagtggcaacctgctcttgcatcagagcaggcacccctttattcaggaattcttcgtcagacaattccagaatgcccggcatgggaattaatcctcaatgctctgggcatcgtcttcctggcgagaaagctcaatggcttcttccagttggtcgatgttgttgatctcgttcgtgagcatgcgttcctgagcgaggatatacatctcgataccaccagttgcttgtgccatcttcaggtacttggcctgttcatccagactctggccaggatggatgctcatctgaaccagacgggcacactcattcttggcatagtccgtgaggatcagttccttgaaatcccggttctgacagaggcgttggagcttttccagcttgagcttggcctctttggccgaattcaactgccggacgagggcttcggttgtgacttcagtctgcatgactaattggtctcgttggtggttttgtaatgggacgatgagccgaggaccggctcaccttccacaataatagatctatgttgttatacctgtccactacgggatagggcattgaacccaatcgccgcttcgacatcaccttctcgttctccctccttccttttttcgaggagagccttggtgatttgcagatcttggttcccttcagcctgactctgctgactttgcattttctcaatgtgcttggtcccgttggcttccttgactgtatccacctgggtggcctgggcatcagcaacagctttctgggtttgagccttgacaagatcaatccgggcctggatctcctgaatctccatctgagctttctgctgttccagttcctgcatcggattcggttggggctggtaatcctcaatagccttggccagatccggcatacgcttcagcagagcaattttgcgcaggatgattttggtcatgttgaagtccatgttcggaccgatggtctgaagcatgaatcccagatcctgggcttgagtgttgtcttgctcaggagtcgagacatcaacaatgcagtcgaagttgcctttcagatcttcacgattaactttgacaaactctttattggtaatacggatgacttcgaattcactcagaaactctgagttcatcgcaatcatcttggcaccaatctcttgcatcaacttcgacaagcgacgaacgatgctcagttcacgcttactcgatgcatccagcacaccacgaataccagcagcaacatcacccaatgcagcggaattgataccttcaccgaatcccttgacgccagacatagactcagcgtcttggttctgcaactgcaacatgaccattgcagactgaggaatctcagggaacgtgtgttgaataacaccagcagctggtgtgatattcgggttgaattcgtagtcgagaccattgtcatagcgacgacgattcaatgggtcaagcatgcccttagccatgccctgctgaccattggcactacgccccatgatatcgatcatgccacgcatgactgcgcctacgatgcgctggttgtctcccagcagctcagcgtcaggttcaccatacagctcacgcttcttcggtgagtagcgtgcaatgacgaatggcagcttggcatcagggaatggatttacttccatgcggacaaggatattgccgatccaagtagccacaataggagtcagatcgccatcaccatcaatgtcgtaaaagccccagtactcaaatgcgacaactttcttacgagccttgtcgttgaactggaacgtatccggcgtgatcgtttcatgctctggatgagtagctggactgttgttgtcccagatcactttgtccaaattcttgtaacgcttgccttctttcttcaactcgctttggctcgtttcgaaagagacgatgacaaacattgccttatcaagatcaccattacacgatggatcgatgatcacattgtgtggattcagcacttcaagaatcggacgattctctattagcttatcgaccttggtagatacaacgcctgtctgtattgcataggtagcttgcccactttcatcatacagatcgacacaagcacgagtagcaggatcaactgattcgttgtatccgcgaggattggctttcttcaattcaatcgcttgctgcaaagcctctgcttgttcagcagtttcgatctcataatgatcgaacgtaggaacatcttcgttcactttgatgctgtgttgcttccagccaacacgaacaattgcagtgccttcgtcaacatcactgcgaaccaagtcatcaaggaattgaaccttgttgatctgattgtcgaactgataattcaacagcagttgattctgctcagcagcagacacgtcttcagcagtccgtggcttaacttcgaacagacgatggttcgacagaaacggttctgacagtgctgcataacgccattctgcttgacgacgaatcagctttggctgcacagatgaacgcccacgaagcttctgtgggcgctctttacccgtcacattacggaggttgtcccactccatgatgcgagtcatctgcgtttgatgagaaggcttagctgcttccaagtcacgcttcaaactcagaagcgttggttccttcttccagtcc

SEQ ID NO: 18 - DNA, 63743 bp, unidentified
  misc_feature 1..63743: note = the genomic sequence of a bacteriophage
  source 1..63743: mol_type = unassigned DNA
cgatgaactcctgccggccctcgccgttggtggcgtggtggcaggccatcatcaggtcgcgccaccggtcgtgctcggagaagtcctccgcgtccagctgctccagggtggaggccagcatctcgggggtgagctcgccgaggcccgcggcctcgccgtgcgccctggtgggccggcggcagaggcgcatcaggttggcgggcatctccggcatctcgtcgagcgacggggccaggtcgtcccactcgtagtgctgcccgcacgggtgcaccgagccggcggccacgacctggcggccgcgggacttgaactccacgccctggtagtcctccagggagtcgagcaggtcgacgtccgccggcttggtgaaccagtagtggtggccaccgctgccggtgatcgtgtggggcgccgtggagaggtccaggtgcgtgtcggcgacgagctcggccagggagtcgcggccctcggggaagttgcgcgggtcgacgtccaggaccatgacggtcgagggcaggcgtacgcccacgttgacgccggtccgctcggcggtctcgatgaccgcgcgggagtcgtactccttggcctgccaggcgccgtcccgcggggtcttgcctcgctggcggcccttggcgtcctgggcgtcgtacctgtgcagcgggatgagctgcaggccgttctctacgtacgcgcgcatgtcccccgtgcgcggtcgctttagtgcgctcactgtgccaccttcctggcggcggcttcctcgatgatcttgcggaccgcgtccgcctcgctcaccttgtccgggtcgggcgcctggcggcgcatctcctccagcttgctcctcaccacctccctgtggtcctccgacacgcggagggacatctgctgattcaaactcattcccctgtactccgtgggtgcatcttggtcgggccggcggcaggccgggatgagcatagtgcgacgacgcagtgcattgcggaaaccgacgaacgcaatgcgtcaggtccgagggcgccgtcgcccgcggacggtggctccgcgcccggacaccggacggtacattgtcactccctaccaaccgctcaacaaggagcacatgcaatggacgtgaacagtttcatggagcagagcctcgccaaccaggcgaagcagaacgccctgctcgagggcatcctcgacgtgctgaaggacatgaatgacaacggggtggtgatcgcgaacgtggaaggcgagcccgtgcaggtcgccatattcggtgcggccatcaacaacaccgcagtgctgaccgacccgggcaccacctcccagccggccgccgagaagcaggccaagcaggagaccaagaaggctgctgaggccccgccggccgagaccaaggctgccgagccggccgccgagcccgaggctgctccgccgaaggacgacaagaagaaggtcaccatcgacgacgcccgcgccgccctgaagaagtacgcggccatcgagggcaacgacgcggccatggacctgctgaccagcctgaacgccaagtccgtcagcgacctggccgagcaggggccggacgccctgcagaagctgatcgacaaggccgacgggaagagcgtctgatgagcgagcagcccaaccagaagctcccgaaggacgccgcgcagctggtcctgtggttcaagggcctgccgcagccgaccgccttcctggtcctccgcgaggaggccgaccgggccgtgcagtccttcaaggacggcgaggacgtgaccttcctctcctaccccgacggccgcggcgtgcgctccgagtcgatcttctcgatcgacgacctgcgcggcgtgaccttcgagtaccccaccatccagctcgcactggtgaactgacatgccaagcgtccacgcggtaagaaacgcgtcgggggcgaagcggtggatgaactgcctgggctccatacgaatggagcacgggcgccccaacaactcctccccggccgcacggctggggaccgccgcgcacgcgctcggcgaggcctgcctgctcgacggcagccaggcctgggagtggctgggtggctacgtccgcctcgacccgaccgagcaagccacggtacaccggcccgccaactccgtactggatgtggcggcgtccgacgtctccgtcccggtgcacgcctcggccgacgggctgccgcccgcgggccacgaggacttcccgatcgacgccgacatggcggacgcggtgcaggtctacctggacaccgtgcgcgacgagatggagcgcatggggccgcacgccgagatggaggtcgagcgccagttcagcctcaactggctgatcggcttcgacttcgacttcgaggcctgggagaaggacccgtcctacgtcagcccgagcggcatccactacgcagccactgacgagttccccctggggcacctgttccacatggacggcagggtgtgctggggcccgatgttcgggaccaacgacgtctcgctgtacctgcccttcgaccacgtctccgtcatcgactacaagcacggccagggcgtcgtcgtcgaggtggaggacaacgaccaggagctgtactacgcgctgggcaaggcgcacgagctccggtgggccttcgagaccctggacctggtcatcgtccagcccagggcgcgccaccaggacggcaaggtccgacgctggtccaccgacaaggccaccctgcgggcgttcgaggccaggctgcgcgaggcggcccgagccaccgaggagcccgacgccccgctcagggcgggcgagtggtgcaccttctgcaaggcggcggccgtgtgcccggcgctgcgcgaggaggccttctcccaggccgccctggagttcggggacggcttcaccgaggacacagtcgtgcaaagcgggcccgaggacagcgacgaggacctgatgctccggatgcgggctatcccgctgctggacatattcatcaagtcggcgaagaccgaggtgctccggcgcctgcgcgagaccccgggcggtcaggcctgcttcggcaagctggtacgcaagaagtcgaaccgcgccttccgccaggacctggtggacgaggtgacgggcgagccggtgtcggccttcgacgtcctggcggccgagggcatcccccgcgagatgatgttcgaggagccgaagcccaagtccccgagcaagatcgaggcggtccgcccgccggagctgatggccaagctgaaggccgacggcgtgcgcgccccggcggcgcacatcaaggcgctcgtcgcgggcgtgtcgttcaagccggagggcggcatcaccgtggccgcgctcgacgatccccgggaggcggtcgacgcgacggccgcggccgagggggacttcgacgcgtacgacggcgaggagagcgcggactaacggctctagttggatcggggtggaagcatgatgtgcttccaccctttctttttaccaggagaacaccatgcacgaacacaagcccatgcaggaactcaccaaggccgacctgagggagatcgagcgctcccgcgagctgatccaggactgcgccgccgacaggggcccgtccctagaggagcgcctggagcgcgcccgcgccggcaaccccaccaaggaggacctgaaggccttccaccgcgaggcgctccacgccgccatgctcgacttcatccaggaggagtccggcatggtcaggggcctcgccgcccagggcaagaaggacctggcccgcgaggtggtccgcctgcgcgccctggtgaagaccatcaagcaggcgacggagaacgtcgacccgtcgcagccgaacttccagcacgccgaggcgttccgtctgatgacctacatccagaccaacgccgagaagccggacgcgcccgaggtgctgaaggtgtggaacagccgcgacggcgtgaccccgttcatcgtccacatcggcggcaagacgttcgagcaccacctgcagggcatgaccggtccgctgtacgacctcccggcgtcggccacgcacaagtgggtgacgcgcaccgaggcggagaccatggctgcctggcggcgcaccctcgaccgcgccgtggcctccgggcggctcgagccggacaaggccgagctgcagcgcgacaacctgtcggcggcgcagtcctggcactacggcatcggcctggtcagcgtcgtgtcggggcgcttcaccgacgaggagctcgaccggccgctcggtggtgtcgacgagacgcagaccccggaataatgagcgcctgccccggtgtcgccgtccaccgcctccctctcgggttgcgtctcggcggcaaacagacccggcaccggggcagactccacctacatcgctaaacagtcaaatcgctactaaggagcgcatcaaatggcagcagccaagcagaacgaccgcaaggtcacctccccgaagttccgtgccagcttcgcctggatcttcaagccgcagcccccgatggagggcagcaccggcgaggccaagtacggcgtcaccatgctgttcgacgcggcggcccgcaagacggcccagttcgaggccatgaagaagctggcctacgccgcggcgaaggagaagttcggcgacaagctcaagccggacggcaacggctggtaccacggcctgcgcaaccccttccgcgacggcgccgagaagtcggagctggagggctacgagggcatggtgttcgtcgccgctaccaccaagatgcagccgggctgcgtcgaccagcagctgaatcgcctcatcaccgacgaggtgtccgaggacggcttctacagcggctgctacgcccgcgccaccctgacggcctacggctacgacaaggccggcaacaagggcgtcgccttcggcctgcagaacgtgcagaagctgggcgacggcgcggcgttcagcggccgcaccgccgccgagaacgacttcgactccgtcgacgacttcgtcggcgagggcgagcagtcctcgggcggcggcagcttcctggactgacgggtccagtctgaccgccccggtcagtaccgccgacgaggcaggtaagccccaggaggggaccttcgggtccccttctttttgcccgtttgatggcgtcccagggcggaaagccccggcatgatagccccacactgtttcggagcacagaccgtgagcaaagactggcaggccgacctggccctggtggaccagcgcaacgaagaccagcgctggcgtgaagaagccgcccgcgtcctggcgcccgtgccaggccagcgcgaggccctggagcgggcccgcgccaggctggcggcagagcgcaagtcgctgctccagcggggcgctgaattgctggggttcaagtgagccccacgaagcgcatgatggacctcattgaggaggctaactaccagttcctcaaggacgaccgcggctgggcgctgtacgacggcgacgaccgctccgaggtcaggggatcgcggtccccgcagctcggcaactcaatctgggcgtcagccaaagagctgggcctcaccaaagaggaggagtgaagatggacgcagaacgtaggaagcggctcaccgagaagctgaagaagtgcatggccctctcgaagagcccggagccgcacgaggcggccgcggcgctccggcaggcgcagaagatcatgtccgagctgggcatcaccgaggacgagctggacggcctggacacggccgacgtggtcgtcaagactcgcgagggctttggcaagtgccgcaccatgagcaacctggccaccatgatggagcgcgccttcggcgtcaaggccgtcttcgagcggaaccccggctccgccgcccgcctgaacgtccgctacatcggccccaagggccgcgtcatgctggccgagtacgcccacaaggtggtgtggcgggcgatgcaggcctcgtgggacgacctgctgacccgccggcccgacatgaagggcgacggcggcaagcgccaggccttccacatcggctggctcaactccgtgtacaagcagatctccgccatcgccccgacggaggccgaggaccgcgccatccagcggcactgcgacaggatctacgagcacggcgtcgtccagcaggacgcgttcaagaagaaggagctcgacggcggggcattccacgcaggcgcccgcgcggccgccgacttcaccctgcaccggccgatggaagagcagcaggccgcactggagcacatcgcatgagctggctgaagaccgtactgtggtacatcctgaccggcggcttcggctcgaagctgctgaccatccccgagagccagcccttccgcgtcgtgaaggccggcggcaggctcctggtcgagcccatccccacccagatggaccccgacgagccggagtacttcggggtcggccagcggatcatcgtggcgccgcacgccggcttccacaagggcgcccgcggggcggtggagttccacgcacccgacggtcgggtgtgggtcaagcgcgacggggcctccagctgcgtcttctactacccgcacgagctcatcaaggaccccgcatacgaggtgcgcccttgaagtgcgacgaccaccagcactccctgccgtgccccctgtgcgcgctcgccgcctggcccctcagggacctggcggccgtggcggacttcgccggcaaggccgtcgacgacacgggcatcgtgccgggggagaggaccgtcaggctgtcccaggtggtccggtcgatcggtcggcggtggaccgagctgtcgcgcgttcagctgacggccctgaagccgctgtacgccaccaagaacgccctggtgcgggaggcccgcataggcgcgatcgacgtcggccggcttgagaaggctgccctggcggtcgccaagggcgccacggccgacccggacccagtggtcgacgcctacgtgcgcgccatcgtgcaggaggaggtggactggtgaagttctcggcataccaccgcaggaagcggttcaagcactggcgcgacccgcccgaggcatgcgacagctgcggcgagcgcctggtcgtcctgacgggcaacgaggtagtctacaagcagcctgtcgggcagtggccctggatctacctgtgtatgtcctgcggggcctactgcggggtgcacccgcactcggtctaccccatcggcaccttggcggacagagagaccagggcgctgaggtccgccctgcacgccatgatagacccgctctggaaggacgggcacatgtcccgcttcaagacctacaagatgctgtccaggatgatgggcatgccggagggtgaggagttccacataggcaacctgaccagggatgagtgcatccgcgccggcgaggtattcaaacactgggagatgatggcggacttcaatgagccgccctgatacagtaagcggctagcccggaggatccatggtaatcgccccgaacaaagagccagcgcaggtctctgacctgccggagcgctcccaggtagccgcggccgtcaagacggccctgttcaagatcgcctccgcctcggtgtacgagacggcgggcatccactacgagacgaacgcccccaaggcgacgatcgactttgaaacccgctccgcctgctccatcaaggactgcggctcctggcggtactccctcgaccccacgacccaggtcatgtgcctggcgtttcgcctgccgcactgggagaagggccgcacggccctgtggcacccggccttcccgcacctgggcgtcgaggaggccgactgccccgagctcgccgagctgttcgagtggatcagggagggccgcctggtggaggcccacaacgcctggttcgagcggggcatctggaccaacgtctgcgtcccgcgcatgggctggcccgcggtcggccacgagcagtggaggtgctcggccgccaaggcggcggcgtactccctgccgcgcaagctggagctgctggcgccagccctggccctgaaggtggagaaggacaccgagggcgccaagatcatgaagaagatggcgaagccgcgcaagccgctcaagcgggacgtggtcgcctggatcgacgacgagggcaccctgccgctgcccgccaagaagtacaagatcgacctgttcgcgaacgacgacgggacctacacggccgtcgcccactccccgatcccggacgtcgaggaggaggtcttccgcctgccactgttctgggtcgagagcgccgagctgctggagcgcctgtgcgcctactgccgcgtggacgtcctcgccgaggaggccgtgtcggaccgcctgcgcgacctgtccccgcgcgagacgcagatgtacctcatggaccaggcgatcaaccagcgcgggttccagctcgaccgggagggcatcgaggcggcgctggagatcgtcgacggcatctacaccgagctgaacgccgagctggtcgagatcaccgacggccgggtccagaaggcgacgcagcgcgcccgcatgatcgagtggttcaacgacaacgggctgccgatcgagaacacccagggcggcacgatcgactcgtggctcaagcgggaggacctggagccgagggtcaggcgcgccctggagctcgtcagggccctcgggcggtcgagcaccgccaagttcattgcggcgcagaactgggccgacccggagacctggaaggtccacggaggcctgctctaccacggcgcgggcacgggccggtggtccggcgcgggcctgcagccgcacaacttcccccgcggcaacatcaagaacatggcgctcgcctgggaggtcatcaagtcgcgcgacctggcgatgatggagatgctctacggggacgccatggagctgctgtcccacgccctgcgcgggatgatcgtgccgtccgagggcaagaggctgatggtggccgactacgccgccatcgaggcgcgcgtcgtgctctggctggcgggcgacgacgaggccctggacgtgttccggcggaacgagtgcatctacatggcgatggcgaccgagatctacggccgcctgatccacgacaaggaggcgcaggccgaagagcgccagatgggcaagcaggcggtcctgggcctgggctaccagatgggggccaacaagttccggaacaccctggcagagaagtacggcatcttcatcgagctggagttcgcccagaagatcgtcgacgcctaccgcgccaagttctggcgggtcaagaagatgtggtgggaccaggaggccgcggcgatcgccgccgtccggaccccgggccgcgtcgtgaagtgcggcaaggtgcagtggtgctgcttcgacggcttcctgcactgcaagctgccgtccggcaggctgcttggctactgtgacccgcgggtcgtcatgaagccgacgccctggggcgagaagaagcccgccctcacctacatgggcgtggacccgtacaccaagaagtggcgtcgccaggacacctacggcggcatgcttgtcgagaacatcacccaggcgaccgcgcgggacctgatggcggacgccatgctcaggtgccacgaggagggcctgtacagcgtcatcctgtcggtgcacgacgaactgatcgcggagtgcgacatggaccagggcgacgtcaaggacttcgaggccacgatggcctacaccatgccgtgggccgacgggtgcccggtgaaagcagagggctggaccggaatgaggtaccgcaagtgatccaagtaagcaccgcgggggcgccccgattcaggctgccgaactacaagcaccagcaggacgagtgggaccgccacagggacgacgacgcccgggccctgctgtggcagatgcgcacgggcaagaccaagtcggtgctcgacctggcctgctaccggtacgagaagggggacatcaccggcatcctggtgctcgccccgaacggcgtgcacgtcaactgggtgcgccgccagctgccgatccacatgtgggagggcgtcgagtacgtcgcccacgcctggcaggccagcgaggcgagcaagcccggccacgcggcgtccctggaccgcgtcctgcgggcccagtccggcctgtcggtgctcgccgtcaactccgagtccatcatccacgacaagccggccgcgctcatcaagaagttcctgcagaagcacaagggccggtgcatgctggtggtcgacgagtcccacgacttccggtccccgggctcgaagcgcaccaagcgggcacgggcgctcaagcgctactgcagggtgcggcgcaccctgacgggcacctcggtgtccaacagcccgctggccgcgtacagccagttcgagctgctcgaggaccacgccctgggcttcgccaccttcggggagttcgagagccagtacgcctactacgtgcaggagaagaccaagggcggcaggtcctacgaccgcctggaccactacaggaacctcgacgacctgcaggccaggatgtccaggtgggcctccgtcgtgctccgggaggacgtcgacgacatgccagacctgctcatggacccgaggacggtgctcctgtccgaggacatgcaggcccagtacaagaagctcctgaaggagatgatcctggagctcgaggacggcggcgaggtggaggcggtcgagggcggtgcgcggatcatcaagctccagcagctcatcagcggctgggtcatcgactccgagggcaacgtgcgcgacctggtctccgacgaggagaacccgaggctgcagggcatgctggaggacgtgcgcgagtcggaccggaagtgcatcgtgtggtgcaagttccgggaggacatccgccgggtggtgcgcaccctggagaaggccggcatcgcctgcgtcgagtaccacgggaacgtgcactcccaggcgaagcgccaggaggccatcgacctgttcaacaacgaccctcgggtgaaggtcttcgtcggccagcccaaggccggcggcgcgggcctggacctctcggcggcggacgtcatcctctggtactcgcacacgttcgacctcatcgagcgggaccaggccaacgagcgggccacccagatcggcggcaagaccgtcaccatcagggactacgtcacgccggcctcggtggacgagtacatcctcgccaacctggagtcgaagcgctccatctccgaggagctagccggaagaggcctgcgcgaccgactgctggctctgttcagacagcagctgtgatactcccggccggacgtgcgaacgacggctccacgacaattagcccggcgttaaactacacccactgacgcacgccgggcaagccgcccgaacgggcggcgacagtccaatcccaacacctatctctgaaggagagatgcagatgagcgaagacaccagcacccagacctccggcgaagcgaccgagaccaaggaccaggctccgaaggccccgggcgtcggcgagatcgccaagggcctgatccgcgacggcaagaccaacgaagaagtgctggctgccatccgcgagcagttcccggaagccaagacctccatggccagcatcaactggtaccgcaacaagctgcgctcggacggcgagaaggtgccgaccgcccgcgagctgaagggcgacgccaaggccgaggccaaggccaagaaggacgccgagaagcaggccaagaaggaagccgccgagaaggccaaggccgagaagaaggccgccaaggacgccgagaagcaggccaagaaggaagccgccgacaaggccaaggccgaagccaaggcccagaaggaagcggacgcccagcgcggcgagtccgccggcgacaagggcatcttcgagtaatcaccgaagcggccgggcagttcgcctggaaatgatggtttaaggggcacggcccctgccataagatagagggacctggtgcagaccaggtccctttctctatatggacgtccaccatgctgccagccaacatcgtcttcgccaaggtctacttcgtgcggggcggcgcgcccaacttctggaagcgccggtacgagatcaccgacccgccgaccagcggcttcgcccacgtcgtggtgattaagggcgagaagcggtccaccatcctctgcccccactccctggaggccttccaggtcagcaaccagtgcggcgagctccagacggcggagcgcttcgacgtcgagccgtccaagatcgcgcaccacatcgagaaggcctgggagacctgcgtcaagctgggattccagaaggactacggcgtggccgccatggtgctcaccgagatggggttcccggtgcccaagttcctgcccccgccgcccgacccgtccaagtccgacgactccaagcgcggcggcaagccgatcgtcgaggactccctccgcccgtgccgccccgagagcaagcgcggccaggtcgccgccttcttcctgcacgacgagccccagtcgcttcatgaggcgatggcccgcctcgggctgtcccgctccggggtgctctcccacctgttcaccctcaaccgcgaccacggcgtaggctacgagctggtaaacgactgcgcccgcctgctggtgcccgagggcttcgacctgttcgcctacgtcgagccggtcaaggagcccaagccggagaagccgcagcgcctcaacgaggacggcacggtctacgagcccaagaagcggacgagcggcaagccgatcaaccaggacgcgctccggccgatccccgagcccggcaagcgcgccacggtggcccggctcttcgtctcgggcttcttccctatcgcggacgccatggcgcagctggacctggaccgctccgccgtgctgtcccacctgttcaccatcaacaaggagaacgggctgggctacgagctgagcgaggacagccagcaggcccgcctcctggtgcccgagggccaccagtgcttcgcccccaagcagccgcgcgccaagaagacggcggaggcctgagcatgggcatccgcgtccagctccgcccgcacaaggagggggtggcggccctcgagcgcgacgggttccaggtggagcccgtacggttcagccggggtgaccacctcatcgtccgcgtcacccgcggcggcgcgtcctgccaggtgacgctggccggcagcccctcgggccagttcctggacgccctggtctgcgccgcccggcggggcatcagggaggctgcggcccgatgaacgaggtgcgctggagggtgcgccgccacggccgcctcctgagggtcgaggcctgggagggcgacgagcccgaagcgggcgagctgttccaggagcggctgagggagacgccgttctggatgctggtcgcctgcagcctggtcaacctgacgacctggcggcaggcccggcccgcgctcgaccgcctgatggcggactacccgagcccggaggcgctgtcccgggcagagcccgacgacctgcacgacgcgcttcggcccctggggctgtggcgccgccgggccgtcactctcaccaggctcgcagctcggtggctcgaggtggacccccgaagcgtcaagattgagtccctgcctggctgcggcaagtacgccgccgacagctgggcgattttcgtagacggcaggaccgacgtcgacccgacggacggcaagctcacgtggtaccttcaacaactgaggaagcagcaagatggatgagatcgacacgaccggcccgcaccaggccctggtagcagcactggtgagccgcatgctcctgaaagcggagcagttcaacgtccagatcctggacacgcccatcccgggcaccccggagatcctgtccagcatccgcatggacgcctcggtcgacgccctgaacgaggagatccaggagttcaaggacgcccacgctgacggcgacgtgctcgaggccgccgacgccctggtggacctgatctacttcgccctgggccgcctcgtcgagatgggcgtgccaccgctggccgtgttcgacgcggtgcaggccgccaacatggcgaaggtgcgcggcgacctgtccaagcgccccggctggaacggccgcgacgccgtcaagcccgagggctggcagccgcccaaccacgactggctgctcaccttcgacctgtccgacgtggcggagctccaggagctgcgccagcaggcccagggccgcgaggccatcagcccggtgtggctggagctgcagcacctgcgggagaccaagggccaggactacaacaacgtcccgggcgggcgcgaggcctacttcccgttcggccacgagtcctacgcacacatgctccacaccaagaacctgcgcatccagtcgctcatcacggctatgcgccagggccgcgagcccaactacgagggcctgtacgacaccgcccgcgacctggtgaactacggcacctactacgccgagtggctgaagcagcagggcctcgggggcgcgaagtgagcggcgtcctcatgccgttctacgacgtctacggtgcactgatcgcctgggccttcagcagcccgatcgaggcgaacgagcgcaccggaacgcgcgtccacgtcggccggggaggcacggcgttccgcgtcgacctgagcgacggcctcctgccgaccgtcggctaccgcaagaccttcccgcggtccgccgcggcggaggtcgcctggtacgtgcggggcgagcaggacgccgccttcatcaccaggtacgcgccgttgtgggacaagtttgtcgagccgatctacccgcagactcctgccggcactgaggctaagtcgggtgtcgcattcccgggggttcgctctgcttacggctaccgctggcgtcgccacttcggccgggaccagctgcggctcgcggtcgaggcgctgcgcaaggacccgacggaccgcaggtgctacgtgtccgcctgggacccggctgaggacggcctgggcgcccaggggcagaagaacgtgccctgcccggctagcttcaccttcagcgtgacgggcggggagctgcactccagcctgttcctccgcagctcggacctgttcgtcggcctgccgtacgacgtcatgggccacgcgctcctgatggacgccgtcgcccacgagctgcgcatccggccgggcgtgatgcacgtgacgctggcccacgcccacctgtacgagtcgcactggcagatggcggcggagatgctccagcacgagcccgtggtgccgcagctcccgctgccgggctggacgctgagccaggtcgagcagcaccccgacgactacgtggtccgctacgccgaggaggcgaagcagcaccagtggcccgcgtacaacccgaagcccgaggtcattgagtgatggaggtgccgaccaagcgatcccaggaacagtgggatgggttcttctaccgcatggccgtactggccgcggccatgtcgaaggacccggaccgcaaggtcggcgccgtcctcgtgacgcccgaccggcggcaggtctccccggggtacaacggcttcccgccggacgtgcccgacctgccgtcgctcctggccgaccgcgccttcaagctggccaacatggtccatgccgaggacaactgcctccggcaggcaccgttccccacggcgggctgcaccgtctacgtgacctcgttcccctgcctcccgtgcgcctgcaagctgagggaggcgggcatccgccgcctggtggcaccgaggcccgacctcggccaccatcggtggggcaagtcctgggccacgtcgatcgcggtgctcaccctcgccgggatccacatcacctacctagaggagtacaaccaatgcgactgctgctagcttcatccatcgacggctacctggccagcggtgccgacgacgacatgcgctggacaggcaagacggacaaggccatcttccgcctgctcaccatgtcgaacgccaacgacgtcctgctcgccgggtcgacgaccttcgaccagatgccccgcctgccgaaccgctccatggttcgcatcacccgcgcgcccgacgccgagaacctcggccttggcaagtccctggggcaggcccagctggaccacccggacgcatggctcatcggcggcccgaccctggcgctcgccgcgctcaggctgggctacgtgacccgggcgttcatcaccgtcgtgccaacggagctcggcggcggcatgcacgccggcgagctggccgagttcctgcccaacaacggcgacacgccggtgcagatctccgtcggggacgtcaaggtgcgcgtcttcaccgaggacatgaagtggcccgggaggtaaggctctgggagtggctgcgggaccggctgaagggcaccgccggcctgcacatgcggcgggtcgagaacctggtgagctcgggcgacccggacgtggacgggtgctggaacggcctgtacttcgagctcgagctgaagggctgcgaccggcccaagcgcggcggcaagctcggcttcgaggtcaggcaggcccaggtcgtgtggcacaggaagaggtggcggtgcggcggcaactgctggatctacgcccgggtgggcaagggcaccgacgtgcgccgctacctggtgcccgggttcaaggcccaggaggtggccgacggggtgaccgaggaggagctggccgccatgtcggtgctccgcccggaccacacgccccaggaggtgctggagtttgcgacaaactcattgggcaatcgcagcatgctcgcctagctggaacgatggtgttttggctcggaacgtaagcgcatactgactccgtgctccaccactggggcatgcgacaaccgggcgacgacccggaccgcacactagaacgaaggagaatcagtcatgccgaacaccgcccgcaccatcaaggaggaggtccgcgtcctgggccgccgcaagcgcgccctcacctacccggcgatggtggacatcatcaaggcccgccacccggaggcgaacacctccgtcaagaccgtccagtggtacgcttcccgcctccgccgcgacggcgaggacgtgaacgtcaaggacggccgcaccaccagcaagcccaccgtgcactgagccacggccggggacaaccagtgtcaggggacctgaggggcctccggagacgtccgggggcccttctctttatatgtacggcgcccaaactggccttcgcgaaactttagcaaaataatttgctggagggggctcccatttgggaaaagaccccatataatgacctcacaccaacgcaaacacgtgaggcacgatatgttcgaggtcaagtttggcggtaagcgccacccggcggcaaccctcgccgacgcatccaagctgttcaccgcatggattgatgccaacgacttcggtgcgtccgacctcaagaagtccgacggcttcctctataaggagggcagccgcgcctactacggctacgtctcctacaacggccgcacttggcgcggcgtctacggtcaggagggccacgtggagatcttcgaccgcgtgatcgagaccacggcggactacgtgcctcccactgaggaggcacctgcggccacggtcgccatcgcgaagccgaagaccatcgctgacgtgatccgcgcgggcatctcggcgggcctcgataacgcggcggtgctcgccgaggtcaagaaggccttcccggaaggcagcacctccgccgcctgcgtgtcctactaccgctcgaagatgaagaagtcgcccgccgccaaggccttggcggcccccacggaagcccgcaaggtcaaggtggagctcaagtccgtcgagtacctcgtgaaggagtggcgtcagggcttcaccgccaaggtgtacgtcgacggcaaggcctactgcaccgtcatcgacatggacgacgaggcgtctccccacttcgagttctcccgcatcgacgcctacaagctgctcgacattgtggagctgcgttcgatggcggctgacatcctcgcgaagagggagtacgaccgcctcacgaagggcaaggtctgcatcatgaaggactccaagctgtacaccatcaagggtgccagcgaagagctcgtccgtcagaagaaccccaccgccaccgtcatcaatggcatgaccgttgcacagttccgacaggtcctcaagactgttgaagccgcacagtaaccccatcattcaagcgcggtagcccaagtgttgggactatcgcgcccacaacccgccataatggaacccatcgacggcacgcactgcgtcctcgatccaaccgacccgtccaaggagatcaccatgaacctgtccaacgaatccaacatcgcagacatcgccgcccgccacaacgagctgagcggcaagggcgccgaccccaagagcctcgcgaagcgcggcaaggccaagctgctcgagcagatcgccgcgatggaggccgacaagactgaggccgccatcgtcgagctcgccggcacccccacccccgagctgtcggagaagatcgagaaggcgaaggaggagcccaacggcctggccatgctgctcacgcagatgaccaacaaggcctccaagcccgccaagccgaagaaggagaaggccgcgaaggagaagaaggagaaaggccccgtgatccgcgtcgtggctgagggcctgctgctcgaggtcatcagcaaggacgaggacggccgcccctacggtcactcctacgagaccatcctcgacaagatccgcgagcagttcgacggcgccaagacctccgtggcatgcctccgctggtatgccgtccacatgcgcgagcgcggcgagaaggtgccgaaccgcccgcgcgcccagcccaagaaggagggctaatgtcacagatgagaacgtacatcgtgggctccgtgcaccacaagggggcccgcgaggcgatcgccgacctgaggaccgacgaggtcctcaccctcaggcgggagccgcacaaccagtacgaccgcaacgccgtggccgtgtacgacgcctgcgggcagatgctgggctacatcccgaggcaggacgcgcccgccgtggcgaaggtcctcgatctcaagctgcccgccgtggcgaagtgccgcgccaagggcaccacttccgtagagataaactgggagaccaaacagtatgagcagcaaccgtaacgacacgatcgacctgctggcccgcctcctgtcgggagacgtctgcccgcacgagattcagctgcagcgggtgaccgccctgctcggcatcgtggcgtcccgcacgcccggcggcctggtcgtgacccgcgaggagctcgagcagataggcggcaagttcatcggcatcgagcaggaccccgactccggcgagatccgcatcaccgcaggcgagccgcccgccgaagcgccccagcccacccaccccgcgccggcaacccgccagtaacggccacggttcaaggagagacccacatgccccgccactacctagcacaagccctctgcgtcctcgccgtccttgccatgggcgtcctcctcatcaggacgttcgcgcaggcgctcgaccgccccatcgtacacgtctcctggcacaccaaggagtgcgtccaggtcgaggaccccaaggccgagtacgagggcaagaagtccgagtggagctgcgagcacatgccggaaaagtaccagcgcgtgtgggtctactgacggcgtcgaccgcgccggggtcacgccatgatgcctcccaggaactgtccctgggaggcatcatcgtatgtgcgagctggatgagggaaatgacgacgggctgcgggccgcgaggggcataaccctggcggtcgggctgagcgtggtgttctgggccgtggtcgtcggctcggtcgtgctcgcccgaggctgccacggcgtgccttctgggcattccaggccggccctggcatccaaggcggcctaggcccggggcctaggacgagtcaggccgcccgaaggcggcctgactgtctgagatccagaaaaagccaccgcccggaggcggtggaaggggatgcctggagaaggaggaagccaggcacccgccgcggggctcacttgctgaagatctccttgacgcccatcacaagggcgcccaccatgcctgacacgacgatgccgagcatggtcagcagggtcttgcgcttcagggtctcggtggtgctgcgccactcgcgcaggtgctggaagtccttctgcacctcgatggggtcgtcgaccttcaggccgagcatgaggaacgtctcccgcacagcctcacgaatgagcgccctggcctcgtctggggtgagattgtggagctgctgctccgggccgggcgtctgtgcggtcacttggattccccctggggcttgtcggtctggcggctgtcgcggtagaagtcgagctgccaggaggcctccttagcccagcggatcgtctccgccaggttgcgggagagcgactcgtacccccgagccgttacggcgaagagggtctcgccgtcgacctggaccagccgccactgtacggactcagtccgtacgggctggggctttggcaggacgggcagcgggggctgcttgggctccgccggcgggtccaccctgggtggattgctcgagcaggcggaaagcatcagcagtgccagcattgatgcgagactgtatgagacccggcttcgccctggcgagcgcgccgaggtcgtgctttgacaggacatccgtcagcttcctcgtggtttcgccagcctcacgctggacagtggagaatcgttcgagcgactccgcctggatcttggcggcatcatcccacttgtctatggcgagttccagggcgtccgccctggccttctccgccgccttgccctgctcgagggctgcaacctgggcgctgagctcggccttgtcctcgaccaggccgtcgtaatggcggtatgatagcacgatggtcgtgaccaaagcaaccccgataagcgcgccagcgccgagcttgtatcccaacggaatcatgtcaccctcctaggggtagatgttggcgggcagctcgaagtgaggcccgtccaggaacgccttctttcccatagccttgcggcggcccacgtactcggcgacctcgtcctcggggtcggccaggtcggccagcgcgcggtcccagaccccgccccagcggatgggcacgttcagctcgaggctggcctggcgtaccgccatggcgaccttgtagcagagggaccagtcccaccgcagctcagccttgccgtccccgtcgaagtcgatcagcggcacgaggtcgaccgcgtggccgaggccgtcccggccgggcaggtgccgcgagtccatggtctggctggcgccgcgcgccaccagggtcgcctggcgctccctggtgcgcaggccctcgtagacctggaagtccacgccggtcagctggattgcgcgctccaccaccttgacgaggtgggggtgcacgcccctcaggctggcgcgcgacttggtacccagtgcgaagctcatggtatgtcctccattctctgcgatgcccctggtgccggggcgggcttgccggcattccctgccggggtcttcagcttggctcgggccagggagacgtcctcccaggtggcgccgaacacgtaggacccgacgatgctgatgagcgtcaggaacgccatcgtgattgccgtgtccgccggcccggaggccaggttcttgtacagcacgtacccgatgacccacatgcagaaggccgacacggcgaacatgaagcgccgccgcaccctccagctcgacttccagttctcgttgcggtcggtcacggcgtaatctccgtccatacgaagtcgcccccaggcccggtcggctgaccgaggtaggccctgttgctgaggaaggcgggcggcgtgacgctgcgccaggcggtgccgtccgagatgttggacgtgcccgcgccgttcggcgacgagctgcctggcaccgtgccggtgacgaccgtgatgctgccgtcgttgtagaggccgacctcccacagattgtcgttgctgttgccagtgttggaggagccctcgtatcggatcaggaagcaggcgccagacagcacgggcccggcgaagacgttctggtaggaccggtcggccgcgttgatgagcagcgcccgtcccgggttggtgggcgacagcccagagtacgcgctcgacccgaagccgaagtccacgtggctgttggagctgatgtagatgttgttctggaacgtcaggccgaacagcgggaactggaacggcagcgccggcagcacggtgttgctgtcgtccacctggccggaccagacgttgttcaggccggtacggccgttgagcgtgttcaggtagccgataccgccggcgacctcgccagaccaggtcaccgaggccgtgccgtagatggagccggtggcggtgatggtgaacgagtaggcctcgccatcggtcgtcggggtgccagacagcaggcccgaggagctgagggcgactccgtcgggcagggccccggagctgaccgagaacgccggggccccgaccaggtacgccgtggtgagctgcaaggacaccgccacgtcgacggtgaagctcggcgcggtattgcggatgcggcccggcacgctcggcagggcctgcagcctgtcgaagatcagggcgttctggaccggggcaccgtcggggtcgaaggcgatcgcgaagaacccggcggtctcgggcagcaggttgccgaccctgaaggatccgtccaggccggtcagggccgcgccggcgggcatgccggtccgcctggcgtacaggcgcaccaggcagtttgccagcggcgagtccacgccgtttagcctctgcttcaccgtgccgccgaccgcgtacaccgcggccggctcggcgccgacgggcctcggacctccggcccaggacggggtgcccggcacggccgtcggcaccctgtagcgcacgaagccccgccccatgaggggccgaggtgacggcacggccgtctgccgcgccgagggtcgggcgtagctgctgtaggccgaggggttgggcccgcggagcgaccccagcccgtacgaagcgccaattgcgcccaggtcggccacggtcagctccaggtgtccgaggtctcgatgacggcgcgaccctcgtactggcggaacgccaggaaggtcttgccggccaggtcgccctcgccctggaaggtgtcgccggtgttcagcacgtactgcagcggggcccacagcccgggcatcttgccgagcagggccgccatgttcgtgccgcccggctcgtggatccagaccggggacatcatcagggcgccgtcggggccgtgcgggtagctgaggctgccgttgcctccccagttgccggagccggacagcgagtagtcgtggcggcggccgagctgcacggggccgcccaggccggtgtaggacctcacggcgtagaggccgggcgcacccgagctgacgctgtacgagacgaagggctcctgttcggaggtggtcgggctgctgctggccttgccctggatgcaggtgttgaaagtgttggcaggggagtacgcgtcgtagtccccgaaccagtagaactcccggtactgggtattgctcgagccggcgtccgggtagttctggaggtacaggtacatcatcttctcgttcgcgacgagcacccacggccggccggccgaggtgctgccggtgtagtgcacgtgccagtacagaccgcccgggatcaggtcgttggtgggccagcgaccgtcgcccgcatcgatgccggtcatggtgtccatgccgtacacgcgggcggcgtacgtcgacgagcctcgggtgtcgtccacgtacaggtaccggccgcggctgcccgcgccggtcttgaaggccgcacggttggtggcggtaaagggcttggtccagccggcgccggccttggagccgtagccgtcgaccaggcacttggtgagcaggttgagcagatcgccggcgttcgagccggtcagcacgggcgcgctcgggtcggagctggagtacactcggacggtcatggggtttcctcagatggttagtaggatcatgaagttcgacgggagcgggtccgtcgtgcccccgccgccgtccgtgccaaatacgaagcccagggtcagggcctggggcggatcgtacgtgccgtcgaacaggaacggcacgctcagtgcctggggcggctggtactcgtccatgggctatatcccgggaacgatggagaccaggtcgtatcgtgcgtcttcaccgtcgtagacgaaaccaaccttgtccgcgcgcgacccggtctgggtcacggcgtacgcctggatcagggagttgaaccggaccacgccggagggcagcccgacctggcaccctcccgccggcggctggcgcagcttcaagacgcagccctggccgtcgatggccccggtgaagctcagcaccaccgtggccgtgagggagatccggatctcgtcgtactggccccagtcgcactcgaaggtgcctgcgtcggtgtcggccacgtgctggatgcggcgggcgtacggcgtgccggggttgccggggtcgcccttgtcacccttgtcgccgggctcgcccttcagcgaggccagccagtccgggatcgtgccgacgaagccgccgtcgacggcgatctcgtaggcgctcttgccgtcggccccgtcgtcgccgtccgcgccgcgcaggttgtccagggagaccaggttgatccaggacgtgtccccgacgtagttccactggatgtacccgtcggccgcccgcagctgcaccggcttgccgtcggaggcgaagaagtcgagctcgctccacttcttggtgccgtcgccgaccttcagcttgacggcctggccggggtccagcaggaagccgatctcgccgttccagaggaccgggtccttgctgttccagttcgccgacgtgtcacggcgctgggcaaatcgctggggtactacgatggttgccatcaggctccgcctccgtcaaagatgacctcgtcgggggtccaggtgcccgccgtgatggtgctctcggtcgtcccgactgccgccgtgtaggcgaaggtgcggcggtggcggttgatgctctcgcccgcgtcggtgatcgagtacagctccatcgtgacgttgccggtgtacgccaggttgccggtcgccgaggtgccgctgatgttatcgcgagcgaccagcaccgcgccgccagcgtccaggaacctcatcccgtaccgcgtcccggtctccgggccgatcgaggcggcgtcctgggtcggcaggacgtcgccggtctgctgcgtgcggtctcggtgcgcccaggtgacggacaccgggccggccgcggtcgcgggcttcctggcgccgtcgacgcgcaccaggcccggcgggtagggcctcgcctgccgcgccaggatcggggtgacgtcggtcggggccgactccagggcgagctggccccgggccgcgttcgtcagcagcttgacggacacctgctcgccgctggcgtactcggtcgagtccatgccggtgtgctcgccgccctggcccagcacgatcaggcgggcgccggacgcgaccgggagcggcagggagtccagcacgccgcgccggaccgtgacctgcgtgtcggtgaaggagacgatctggacgatctccttggcgttcgaggggccgtagccgatgaccgccaggtcgcccgcctcgacgatggtccagtcggtcgtcgcacccagggccatgacggtggtctcggggctgtcgtcgtaggcggcgctgatgacggcggtggggcagaagctcaggtccgtctggtcggcgtagcccgcgccggcgctgacgtacatcgccatgttcatcgaggtcccgccgggcgagacgcccgcggccagggcgtagccggccgtcttcggcagctgctgggcctgggcgtcgccgatctcccggacgagcaggtagtacggggtgtccatcgccaggcggtagggcgacggcagggcctcgccgctcgggggctgccactcggagggcggcggcggggcgtaggacgccgaggtgagcgagaacacgtcctcgacgacggagagcttgatctggttgctctgcagctcgcccagctcgatgttggtcacccggaaaacgatgttctccacgccgtactccgcccaggagaagcggaacacgtcgccgatgttcagggacgccgcggcgcgggtcgcgtacagggtggcggtggccagcggggtggacagggccttcaggtcgcgggcggcggccacggtcgcgatcgagccgttggtgaagcccgggtactggatggtcgtgccgaccgtgctgccctggttggcggctagggcgatgtcctgcacggtgatggagccgtccttgccggtcgacttctcccagtacgccacgctgacctggttggtcagctcgtcaaccgtgcggcgcttgaagtcggagacgcggatcacgttctcctcgtccagcaccatcagggtgctctcgtcgtacccgcctcgggccagcttgagcacgaagcggccggtcgaccggtcggtgtacagcgagccgtcgatgtggcggagcacgatcgccaggaagtcgctcaggtcctgctgggtgtcccagagcagggacatgcccatggactccgagtgcagctggtcggcggccaggcggaacgcggtctcgtccatgtcgccctcggggtagcccatgccccagtccgggtcggtcagcacctcgcggacgatgtgggccgggttcatgtcgccgtcgccgatctcggccttggcgtcgtaccactgggccaggccgttctgccgggtgtgcacgcgggtagccctgaaggcccagagcttgaggtacgggttgttgcccaggtagacgcggcggagcaccacgcccagtacccggcggaaggccgggattgcgccgccgagctggccggccaggtaggtgttggcgacctggtcgtccttgcccatcatgacgtcgaccgtgccggcgctggccgcgatcggcgtggtggacgggtccagcggcgggtcgatgcggtcgccgtaggacttgttgaggtagtccagcatgaagccgccgatgccgccctcccgctccttgccgccgaacaggttcggggcgcagaccatgatctggccgccggtcgagctgcccttccaggccagcttgtcgtccacccggatctcggtcagcttgtcgaccggcccgtggcacaggaccatgtgcatgcccaggaagtacttgtacccgatggtctgcttcttaccgccgcccatttttggactcctctacgacggccagggccatgccgtccccggtctccgccagcttgtctgcgtcgatgccgtcccggaggaaggcgctgtagtccagcccgtggcgctggaagaatgagcgaacgccggcggagcagtagcccagccggcgcatgtgttccatccgcaccacggcgcggtcgtccgtcacttcttgccgcccttggccttgatggcctcggtccggaagtccccgtaccagcacacgttggggcccttcaggtccctcgtgccgaacagcaccgggatggcccgcccgacctcggccgtcggggcggtgatgtccccgaggccggccggcttggcgttctgcggcttgggcatcatcgcgtaggacgcgacgagggccacgatgaagactacgatataccaccaaatcatgctagtaacctctcagacgatggagcttccgtcgaacgggttgcgcgtcgggatccacgggaacccgccgaagttgggcaggttgttgaacttggcggcgcacgtcgtcttcaggtggttgcagcccgggtacagcctgaccgcctggtcgcccgcgaggctggccagcggcctggacagcacgaccgtgccgccggtgtggctcacgatgaagcgggcagcgccgtcgggcgccaccaggatgccgccggcgaaccacccgtcctcgtagttgccctcgacgcccgacaccacgacgttgaggccctggctcatgccgatgaccgtgccgttgtgccggtagctctcccggttgacgttgcagccccggccgtacagtacgtggcggcagccgtactcgaacttggcgcgcagccccgggcggcggatcgaggtgtagaccggctcgcactcgaggtcgatggcggagtcggcggcagaggcgctgagcacgcgccccttccagtagatcacgaactgctggtccgggtcgccgtagtggccgcggtagatggtgagggaggtcacctcctcgggggagaacccgaggaactggctggcgaactcgtcgtcccgcgggaacttgaccttgatgccgttcttgaagatgtccgtcgactgcttgacccggtcgcgggagacgctggacggcttgtacaccacgccgtcccgcaccacctcgaaggccccggaggcgaaggcccaccgctgcagcccctgggtgaactcgtacagctctaccggcgccccctgctccctggaggcctctatcgttgcgtagctcatcagtctccctcgggcgtttcgatgacggggatcgtgctgctgcagcggcccgcgtatgagtgggtgatctcgacgctgtcggagtccaggcgcacgtggcgcatgaagcagagcaggtcaatctcggacgtagcgaagcccctgccgaagccggcagcgagcgacagaacctcgttgccgtccgtgtcggtcgagccggacagcacgcggttgtacagcaccgtgccgtcggtcagcacgagcatgaggtcggtgaccccgtagtagagggggtagccgatcgggcgcaccgtcagggcggtggcggccgagtcgacgttggtgagcacctgtaggtcccggttccagctcggcagccagaagcccttctgcttgccgcggcgggcgtggagccaggtgcggtagcgccaggcctcggccctcgacagcgcgtccagcccgatggtctgggtgctctctgggtagccccgctgcgggtcgacggtgatcgggccggacccgttgtcgaactggtccaccggccggatgatcttctccgacaggtcggacagcatgactgacctgtccatgagcacgtcgcgcccccggtactgcggcagcccggcggacgcggccaggtccacgttgttcgtcaccaggaactccacgcgggcctgggtcatgtcgtcgggccgacgggcgaactcggacccgttcagggtgcgggcgtaccggagcggcatcacgtaggcgttctcgaaggagcgcccggtcgggacctttagctccaggccggaggcgtccgcgctcagcacctcgacggtcagcagggtctcgtcgtcctgccacagcagggcaatgtcgttgttccggtagtcggcgctggacgcgtcgaagtcgaggcgggtctggccctccaggacggtgccgaggcgggtgacctcgccccagaccgggacgccgtacacccggtgggcccactgcgtgctgatggccttggcccgggagaactggtgcgggtcgagctggaactcgtacaggaagcgctgcctgggggccgtgcggagcgccaggcgctgctcggacgagtaggcctgcagcaggtccgtctgccactccagggactccctgaacttcgtctgggggatgaagggccagagcacgacgcggcggccggagagccgcagggtcggctcctcgtcgccgaagtcgaagacgtactggcccgcgatcgtcggcgcgccgttggtcgagatgctgacctggtagatgcgggactccagggcgccgaacgtggtcggcggcgcctcgggctgggtcagcgtcacgccgtccaggccctgggaggtgatggcctccagggtgcggccgtcgaagtgggcgttccagacctctacggcccgcgtctggctggacagcaggttgcccaggtcgatcacgccgggccggatgtgcacgcgatagtacaggtcatccacgaagccgccgacgcggcggtccgatccgaaagacggaggagcgagcacggcgacgggcggcgccggcggcagggccagccgcgaggcgcgcgagtgcctgggctccacaatgggaaagccccaggggtaggtccatgcccccagggtgctcgaggtgtccagcgccgaggcgtccggcgtcggggtcaccaccctcaaaacgccggtcatctgcaccactgccatgtcaggcctccttcaggatggcgtacccgcgctggccggtcgcgccgcccttctggtagtacgggaagaccttccaggtgtcggatccgagggtgaactcgtcgccgggcacgtagttggtcatctccagccggcgcatgtgggcgatctcgccgtagggcgaggcgaactggttgccccggccgatgtacacggtctggcgcagcagggccgtctgccagccgagagcgctcggggtgtactggcgcaggccctcgtcgtagtacgactggccgatggcggccagcggtccgtaggtggacgtgtccgccgtgtacctggaggcggcccagccgttgttggagtccacgttgcatcgcacgaagctggcggagtcactcccccgctggtagcccatgcggaacgggatcagctcgttctgctgcgacgagtccgggccgtagccgctctgctcgtagtacgcccaggtcggggtggtgctcgtgccgccgaaccaggcgccgcccagggccgccgagctgaacttggagaggctgccgaagcccagcatctggaagcggccggtgcggtactccacgacggcgaagatgtcgtccgagtcggagtaggagaagaagtggtaggccggcacggcagccgtcatctccgagatcatgcagccccgggtgtagccgttgtagctgggcgcgccgggctggcggaatgcccctcggccggtgtccgcgccgtcgtacccgtcggccatgctgagcgccaggcaggagtaggagttgctggagctctgggtgtacccgttcaggttgtcgttgagggcggaggtgccctggtgggagcacaggccgacgaagagcccgttcttctgcaggttgaggcgcgccgtctggcccacgccgtcccaccggttgacggtccagcctgccgcgatgcagaagagccggagcttgtccagcaggtcggcgacgctcgttgcggccccggtctcgtatgccatgtctatgtcactccgccttgagggcccagtactcgcgtacgtcggttcggtaggtgttctggaagaccacgtagtcctccccttcgatggtgccggtgttctcggagccgttctggaaccccgagatctggaagcagccgtccagctcgcccaggaaccgccccgacggctggcgctggaacagggtcgatggcaggacggtgaagccgccgccgacgttctcccggatgccgtagccggcgctgctcgaggagttgttgccgtcgaacatcccgtgcggcagcacggagccaggggagctggaccaccgggagtacgactcggactgcccgccggagctcggcctgttgtgcaggtcgaaccaggacccgtccggcagcatcacgttgagggtggtgctgaacgccgccacttcgctggccgagacgctgttgtagctgcccggcatcgggaaggcgctgtgcgcggccgacacgaagtcgtaccggtagctgtccgagcggggcgacatggagccgccgatcgccatcgggtacgggtactgctgtggcgaggcgtagggcaggaagaacccggcgtaccccgcctcgaagacggtcgacaccttgaacacgaacaccacgcggcggccgctgccaacgaaccagaagggcatggaggcgccccagaggggcacgaccggccacccgctcgggtgcaggccgggctggcggtgcggggactgctcgttcggcaggtagccggtcagcccctgcaccatcatgaagtactcgcccgtgccggtgttgtagctggtgcggaaggccgcgaagatctcctcgtcgcccgccaggcccgggcccttgaccaccaggtaggactccgaggacgataccagctccgagccgtcgtacagccacagggaccggagctcccactgggagccggtcagggtgccgccgtagtcgccggtctgcttggtgaccaggcgccaccacaggtgctcgcccgtggcggagggcacggtgaaggcgcgctcctcgttggcggtccaggcgcgctgctcggtgacgtccagggcggtggaccacgcgctgccgtcgtccgagtactccagccggaagttgcgcggcgtgtagttacggacgttcgagctctgcccggccttgagggtgaaccgcgtcacggcccgcgctgcgcgcatcttcaggcgtacgtactggtccggggtgaacgacgtcgacgacaggtactgaccgttggcgtcgtcgttgtagttctgggtccggaagtccggccggaacatgcgatggagggaaacgcccgagctgaacggcagggtcgtgtccacggagtccaggttgtcggggacccaccgcagctgctgccaggtctgcccggcggctaccaggctctcgttggcggtcaggaacaggcgcagcttgtccagcgcgtccacgtggttggcggccgtgcccgttgcgaaggccatctgaatctcctcggttagtagcccagcgagctcttgttgcggttgacgacgttcatgatgagcttctccccctcgtccgtgccgaggtagtcgcccaccaggctcgggtccagcacgttcacgttcttcacgtgcacctgcggtgccatctgcgcgggctggttgccgccgtccgggtatgaccggccggtcagctccctgccgcgcaccgaggcggggcccttcaccagctccgggccgtactcgccgacgatgccgaccttgccggccgggatctggccgccctggtcgtacgcgccggcgaactgcgccccgttgatctgggagatgatcgaggcgccggtggcggcgacccgggccatctcagccaggttggccgggaagcccagctcctgggccttggcgaggccggtcgagatggacatggcggcctgggcgacgctgaaggccttgctcacggcgaatagtaccttgtaggccttggactgctcgccagcgtaacccttggccagcccagcgaggccgtcgaacagcgtggccgcgccctgcagctgggtctggatgcgctgcgtctccatctgggcctgctcctcggtgaactgcttctggaggcggcgcagcaggtcctgccgctccagctccgtcaccgactcgctatccaggatcagctgcttcttccgctcgtaggactgcttgagcgcctcctcctcggtcaggagggagttgtacaggctgtcccgctcggactggcgctgccgctcggcgtcggccagggccttgtcgcggtccttgacgacctgcgcctccagctccgcccgggccttggagccctcggcggtgttggcgcgcaccatctccatgcgccggtcgtaggactcccggatggcgtcctcctgcttcagcagcgactggcgcagctgctccagctccgagttgccgtaggcgcccagcttcttcagctcggtgtcgcgctcggcgtcgaggcggctcatcagcctggtgcgctcgtcggagcccgccttggtgttggcctcgatgatcgccctgcgcttgtcgtaggaggaccggatggcctcctcctcggtctgcagggactccttgagccgggcgaactcctgctcccggcgcttggcctcggcggccgcggccttgtccacgcccgacgaggcgggcttctggcggtcgccgccgatgcggaactgtgccaggcggtccgtgccggccgccgccttcttcttggcctcctgggccttgtcgtactcctcgcgcaggcgcttggcggcctccagctgctcgttgctggacttgagggtcgcgtcgcgctcgtccaggatcgcagagatggactccatgcggacctgggagaggcgctcctgctccgccacgaaccgcttcatcgaggcggcgatggtgtcgtcggtgaagatggccttgatgctgtcccgccagaactcggcgccggcgatcatcctgtcgatgccggaggcgaactcgacggtcaggatctggaccatcgcgcgcaggttggagggcagctccttgaaggcgctgatgaggaagtcgacgacggactcgccctcgtcctcccactggccgaagttgtccttgatgaactgggtgacgatgtcgatggacttctcgatgtccgtgccccagacctcccactggacggtctgcgacttgagcagcgcctccatctggcccgacgcgatcatgtcggtcagctcctggagggcgtcggtcgcggtgcgcacggaggcctcgatggcgtcgccgatgccggactggctgatggtcagccacagctggtcccaggtgtcgcccaggttcgccatggcgccgtcgagcgagtccatgcggcgctccatcgcgccggcgaactcgttctcgcccaggtccgtcaggtacttctcgatctcggccgcgttgttgccgatggtggtggcgacgccccggaaggtcagggtgacctggtcaccctgctgcttcgccttgatgccgaactccttcaggcgctcgaactctccggtggcggcgtcggccaccgcctcgatcatctggttgaggtccttgcccatcgcactggcggtgttgccgtacgacatgagcgccttctcgctcggatcgaggcccaggttcaccagcttggtgaagccgtcgacggcctggttcaggtcgtagggcgtgttctgggcgaactcgcgcagggcgtcgaaggcgatggccgccttctcggaggagccggtggcggtgatgaggcccgcgttcagcacgtcgaactggcgttgcacgtccaccagcttgttcagggtgcccattacgctgacggccgcggccagcggccccagcagcttggtgaaggcccccatgaggcccgcggtggccttctcggccccgccgccggcggagctcaggcccttgagtcgcccctcggcctgctggacctggagcgactcgatcttgattgccagactggcgacgtcagttgccacggttgttcaccttccagaaaatgcggtcgagggacttgatgaggtccgcctcccagcccagcagaggcttgccggtcatctgcgaccaagcctgcatctcctggaaggtgagcggcaccccggcgaacacctcacggaaccactcccagatgtacccgagctcctccgggagctcgggcgcatcctccagctgaggcggcttgcgcttcagcgtcttccacacctgcatgagggacgcacgcagggtctgcttacttcccttcgggatcaggtcgagcttgaactcgtgctctgcgaaggctgcgagctgctcgacccggctgcgaaaaaaagggcgcgcttggacgccgcgacgtcgatggagtccatgatctggggcgcctcgacgaagaaggcctccacgttgtcgacggtgcacggctggtcgaacgaccaggcgaccacgaggtgagcggtgaggcggcgcttcgccttggcgatctcggccgcccgctcgacctgggagtcgagctgggcgatccggatcgcgtcccggcgggcctcagcgtcggcctgccggaacgcgtccgagtcgatgccgcggatgcggacccagtgctcgctcttcgtgccgtccgggcgccacagggggacctggatcccctcgttggcggtgccgcgggtgaagaactcgttcatgccagccgcccccgcggcgttgttattgttctggtccatggcttatgcgggcaccttgtcgatgatgatgttggactgggtcacgctgtccaggagggcctggaacggcatgctcagggtgatcgggccctcgccctcgacgtccggctggccgccgttgtacttgatgcggggcagggtgaagacgtacttgttgcctgcgccgtccgggagctcgaagacgatcgaggactcggtctcgttgatgaacttgtccagcagcagggagttctcgaagtacgccgtgatggtgcccgacacgttcgaccggccgatggacggcaggatcgacttcttggagcccaccacgaagcgcgcctccaggccgttctccaggttcagctggatctcggtgatgacggcgatcggcgtgccgttctcgttcagggtaccggtgaacgagtccagcggcgaggtggtcgtcggtgcggcgtaggtcgcgccggcgatgatggcctgggcggtggacatgtccgagccgaccgtgccgaaggtgccggtaatcatcgcgttggcgctgatggccagcgccagggtgttcagctcgacgccggtgaagcggtggtacggcttgtcggccgtcgcgatgtcaccgaagaagcgctcgacggtgaaggagcggcggaccgtgccggccttcaggcggtcgccgtcgccgcccggggcgccgtctgccacccaggtgcccagggtgacggcctccagcaggtcgtcgaagctgccgaacgagagctcgaagttgatgtccccgcccacctggcgtgcgccgtggcggaagtcggcgatctggcggtcgtcgcggatctcctcggactgcagggactccttggacaggccgagggtggtgcccgtgtggcggatgggcttgaacgcgggggtcgccggggtctgaccgtagacggtctcggcgacgtagcgcatggagtggcggctgccgtttgccatggtggtacgctcctactgtggattagtttcgagagacccgggcgaaccaggtgacggtcatgctcacgcggtaccagccatcgacctcgcgcccgcgtgagcggccgcacgaggccaccgtgagctcgacccccgagtgggcaagtcgcttgcccgccttgaagtagtcagtcagctcgtccgccttggccgtcacggccgcctcgccggtgttgagtgggtagttcaggtcgatctgcaggatgccgtcgtgggcgtcctgaccctcgttgcccagggtggcgacggagggctggttgcccatgatgaagaccgaggcccagggactctggtccgacggcttgtcgaacggggcgttcggcacggcgtagggcagggcgagcggggagtccttgaccccctgacgcagcgccatgtccagcccgctgtaggtgttggtagccattgtccgtccttacctgccgaatgcccgggccttggcggccacgatccgcttccaggaggccacgtgccttcgcaccatgccctccggcgcctgcttgctccacccgtcgtactcgatccgctcgacgtacggcaggttgttcgtgaaccagaccacgtcgaccagcgagcccaggttggcgacggcctccgacatggccgcgccgcctcccaggtcgagccggtcgatcgcggcccagttcggtgagttgatggtcgtctgccagttgccgcgcagccggccggtgtcgaccggcgtcgcgaagatcaccagcttgaagagctcgaggaccgaggcgcggcgcacctggtccaccctcttcagggtcttgacaccgaaccccttcagctgctgctcgaagcgcgccacgttacctccggagctgcagggcgaacagcagggccaggcccgccggatcgaccgagtcgaagtccacgatggcccactgggtgccgctctcctccaggaagacgtcgccctgcttcgggcgctcgaccgcctggatgtagaccagccggtcgccgcggcggatgttctcgccgtcgacctgcttgtcgctgtagtcggttatgacgccgacgaccgggaagtcggtcgggccggagcccggggtgacggtgccgtcgaccgggtcaacaacgaccgggccgcccggacgacggagcctgcaggactggccgaactcggccagcagcgcgtcgacgtcgtccttcatggactggtagtcgaaggtcgccatgtcagcccctcgacagccggccggagttgccggactcgacgaggccggcctgctgcagcgtcatggtgacctccgggaactgcggcgtcgcggccgccaggttggccccggagctctcggcgaacgtggtcgagagctcgatcggaccgaccttcttcgtcacctgggtgaccttctggccgctcgcgtcgaacgtggggtccggcatgagcggcttgcccgagagggcgcggttcgcgaccatgcagaccgccaccgtgagggcgggcggcaggccgcggaggaatgaggtgacgccgccccggggccactgggtgccctggagccggcgtcgctgccagcccacccaagagtaccgggcgtcgaggtaggtcgtcgcgttcacgatcgcctgctcgagctcggtgtccgtcttggcggagaggtcgacgccgcggtccgcccagtaggcgcgcacggtggcggggtcggtgtaggcgttggcgccgtcgaccgtgccgtcgttgtcctgctggttgaatgccatgggtcgatcctctcctgtgggtctgtcaggggcttaggccttggcggccttcgccttggcgcgggtgtagccgtcggcgatcgcgtcgacgtcggcgcgggacggcttcttgccggtcagagcctcgaggcgctcgaggttcggcaggttgttggacgtccagtcctggtcggcggccgggtccagcaggccgatcgcctcagccaggctcggcagcgccggcggggcgggcggctcctgcgtgttggtgttctggcccacggtcgcctggtccgcatcgcccgacggggcgaccacgacctcgcgcaccatcagctcgtcgccctgggtgaacaggtcgccgaagtgggagcgcatggcgccgaccacgtagtccgcgtcggtgttctcgcccggcagggcggcgatggcctcgtccagctgcttgcgggtcggcttgccgccctgcttggagcgcagctcctgcagctcggcctgctcggccggcagggcgccgtagaagccgaagacacgggtgaggctggcgatctgcccgtcgttgccggcgaactcgtactcgccgtcgacgaactcgtgaccgttgacgttcatggtcttgccctggtgcggtcccaccaggacgaagcgctgggtcttgctggacatgatgtccactcctttctcttggcctataggccacgaagccccgccggcgtaccggcagggcccgtggtgctcagttgacggtccgcatcgggatggcggtggcgaggttggcctcgctcagctccaccacgacagcgtcgctccagtagccgtccgggccggggcgagcggcggccgccgcagcgcgggcgtcggccggcttggtggtcgagtcgtccgccacccagacgatgacggcgtcggacttgtcgtacagggtctgcccgcagcgcgagccgctcaggcgtacgaggtgtgcgctcatgtttcctgtctcccattaagcgcccgccggcattgcgccggcgggctaaccgagatcagcgacgccggcggattaggccggggtcacgcccttcagcacggccaggcccttctcgctgaacagcgcgaggccgcagtaccaggagatacgggtgatgctctcgtcggcatcctccttctcgcccacgtacttgacgtgcatgcccgcctgcttctcggcggtcaggccggcgatgccgtgggtgcggctgccgtcgtcgaaggtgccggcgaacaccgaggtggcgttcgtggcggtgccctgggtctgggtgatcgggatccagtcgttgcggaagatcgggatgccgcggtaggccggcacggtgcggcccgacgccatggtgtacacgtcgcccggcgaggtgccgcccagggcgcgcagcagcgccaggtacttgcggcgggtgcgggagtgcatcatcaggtagtcgacctggccgtccttgtcggtgacgaggtcgatcagggcgtccaggtcctcgaaggacaggcccgcgccgttcgccgcgccgttgttggcggtgatggtctggctgcccgcgaccaggctgaacaggccggcgacgttgttgccggtgccgtcgccgttcaccatctggttctggtactggcggccggccgacttggccttggaggcgacctggacggcggtctggtcgttgccgtcgcccgagcgggtggcctggatcagaccgttcacctcggcgtcgccgatgatggtggtcagggtcgaggtcacctgggtgaaggtcgccgggttcttggcggtgatggtcgagccgacgccagccatctggacgtcgcccagcacgttctcgcgattgtaggcgagggcgttgccgtcgatgccgtcgaagggcagctgctcgaagatctcgttgacggtgatgacgttctcgatgacgccagcgacgagctcgtcctgggccagcttcgccgactcggcgagggtaacggatgccattagggttctcctgggaggcgggtggtgggatgcttgggaaaggtgccggatcgcccgacgattcgacccctgggccaaggcatcacgcctctgcagggtcagcgagcgcggcagggtatgaccgtgctcgcgtgctatggttcgggactttgccgtgacaacccgagctcgtaaccccctgaacgctggtccagcgcgagaatctgagcctcctgggcctccggaggcctgcctcagacgagaaaaagctttacggaccaaggacttaagccgtatctgagccgaaacgagccttcggcacgtcgttgtcccaggaaatcggccaggtcccaggtccggccacggctcgaggaacagccctagaaggtctagaaggcctagacggtccagctgcgacaaggacttagaggccgagctgccctagaaggagggtaagactgccttagatacccttatttctttagatctaataaaaagaataaaaatagttctataagggggctcccatatcccaaaagaccccgtataatggactcacaccacggcaacctggtaaacagatggaccgtaagccctcaaccaagatcaaggcaccgcgataccgacaggcctgccctcggcaaccgatgaaccgggaactgtggcgcggtctgtttgaagaggcacgcagcctgcatggcagaccgctcgaggggctcacgtccgtcgacgacggtcgagcgtggttccaaattgcgggcgacgcaacgccctactccgtcctcctgtctgaggacgaactcaagatgttccacctctgaggtagacatgaacaagcccaccaccgagaaggccatcgccttcatggcaaagaatcccacctacttcggctcggccggcggggtggacctgtacgagcaccccaccctcggcgacgagtcgcccatcatggctatcacggcggacggtcgcgtcaagcgcacccacctgtgggacatgtccggcgtcgagtccgaggccgacgagctgaggaacctgtgatgaccgtcaagtacaagaacctggaagacacgcccatcgaggacctcgcgcaggtgatgcagctgctgcgcgacctcgagatagcgcccaccaccgtcatggcctacgccacggcgctcgacgccatcgagacggcggaaggggccttcaccaccgtcgaggttgccctcaacgacaacgccatgatcgaggcggaggacatggacttgcataggacgatcttcgagggcgcagagtcgttcctcaaggtcatgggagagatgtgatggcggccttctcgtgcaacgtctgcggtcagggcttcgacttcggggactgccggtgcgactccctgcccgaccctcagccctccggcggactgccgtccgtcgaggcgctggccgaagccttcgtgcgcctcctgaggatgaacctcgggcaggacgtctacgacaccgtcgtggacctcaactccagggagctgaaccccgacgtgtgccactcgggggacttctgcgactccaacatggtgatggacgccgccttcggggagctcggcgtcgacccgtcttcctacggccgcgaggacgaggacgacggcatgccgcaggaggtctgcgacctgtggaacagtgcgtgggaccgcgccaaggtcctcatgcaggagcgccgtaccccctaaacagtggcattgtaccacctaattgggcgtcatgatgcccgtgtccctaccaaccaaggagagtcccatgaacttcgaagacctgtacctgatccctgacgactacctcgacgccttcgccgaggccgcgttctccctgatcgtctcgcgcttccgccagccgtcccacgccatcgccgtcaagcgcggctggtcgacgctggtgggcaactccgcccacccgacggcggccccgcgcggcggtgccccgtggacggaggccgaggagcgcgacctcctcgtggccgccgccggcaagatcaacctgaccaagctgtcgagggcgcacggccgcaccgagcacgcaatcgcctgccgcctggagcagctcggcgtggaccgcctcctgatcgtggcctccgacttcgagcccgtcgaggcgcccaagcctgccccgcccaagccccgcatgaccccgacctcgccagagtcccgcctacgcaccctgctgacgatcgccatgggcttctccagcgccgagcacgtccgtggcctgcccccgccggacatcacgttcctggtggcggacgacctgatcgacttcgacccgaccggcaagcagcccccgagcctgacggagaagggccgacaggtcgttgactccgtcgtgggccgctcgaccggccgtaagcgcgccgacctggcctggaaccccagccgcggaacctcggagatcactgacgggcgattctacatggtggcctccggcgacgtctacaaggacggctgcgcggccggccgacctgcgctgaagaacccgccgaaggccgtccacttcaacggcgccaccgccgacggagaggccgtgcgcctcgccaacctccacccggggacgcgcttcttcgtcctgcaggcggtgtccgtgcaccaggcccccgagcccgtgctcccgcccgcggtctcgaagcgagtctgacggtacactgtaaccccctgatccgcaaggagttttcccatgcaagagaaatacgaccgctacaccctgttctacggcggggtgttcagccagtggtacccgtcgcccatggtgatcgacggcgtggagtacggctgcgccgagcagtacatgatggcccagaaggcgagggtcttcggtgacgagcaggcgctggacgagatcatggcgacccagagcccggccgagcagaaggccatcggccgccgcgtcaggggcttcgaccgccgccagtgggactcggtgtcccgcgacgtcgtgatgcgggccagcctgcacaagttcaccagcaacccgaagctgcgggcgcagctcctcctgacggagggcaccctcctggtcgaggcaagcccgacggacgtcatatggggcatcggcctggacgagcgggatccccgctgccacgacccgagggagtggcggggcaccaactggctcggccaggtcctgacggacctgcgggagagcctcacggtgctgtcgctgtaaagagaaagggcgccctgaggcgccctttccttttgcccagccgttcggttactggcggcgcttggcaaggccagcggcgatcttctggttgggggtcagctcgccctggcgctgtacgggcttctggttgccggagcccggcggcttgccgccgccgttgggcgcctcgctctcgaaggcccggccgaaggtctggtggcccttcagctccttgaccaggtcctcgaccgtcatgaagccgcccgaggcgttgccgcgcgggtcgcccgagtcgtcgaccacgcggaccacgtagtcctcgccgtccttgacgaccttggtgcgggcggtgatgtgcggcagcagcaggtccggcacgcccttgtgggcggcgatcgcctggaccgcggcggaggtcaccaggtacttctgcagggacttgcccatgccctggatctcggcgtccttcgcctgcagcttggtgttgaagccgctctccagggactgcttcatcttgtcccagttgaccttgccgtccttcgactccgagatcagcttctcgacgcctgcgcgcagggtctcggcgttcatggcgtcgtcgccctcgatgccgagcagctggccgatctgggcgaagcccgagacgtccgggcggttgcgcttggcctcgtcggcgtcgcggcgggccgccttcagggacttgttcaggccgtccaccgcggtggcggtgcccttgaagctgtcctgcaggacgtagccgccctcgccctctccgtagaagccgcggaactgctccgggaccttgtcgatgctgtcgacggtggggttcttcaggaactcgaagtccatcttatctccttctgcgcatcacgcgctggctgttgggcgtcgcgcccggggtgtataggctggcaccttaccgccggcgccgggcccacgcaagccaacgttcaagcagaaagagaaagcccgccattgcggcgggcctcttttacagggagccgggcagctccgcgcccaggtacttccccagggcgtcgtaccagccctcccgggtgatcgggcccccggcgagcgcctcgaggtcggccagctgcacctcgccccggcccgtggacccgtcccgccacctggtcagggtgtagaccctgccgagcagcacctggtagaacagctccggcgccgcgtcggggtcctcgggcacccccggggcgaagtccatcttcccctcccactccgggcccgcctcgaactcgtccgccatgtcaaacctccgtcactgtgatgatgtacttgccgttctgctgcaccacgtcgtccacccggaaccgggtgccgggcatgaacagcacctcgcgctcggtcttgtagtacgagtactgggagacgttcacgccggtcttgccgttgatcctcatgtacacgttgccgctgaacgccgcctgctcgccgtaggacgacgagacgaaggcggagtcctcgaccacggcgcccttgcggtacgtggacagcatggccttcagctgcgagtcgttgaacgtcatgccgcgggagctgacgccctggaacttcggcatcttggacatgccgtgctgggctgcgtccacgtaggcctgcaggtgcgggtccgacgagtacttgcccgcccggagcgcgttgttcagcgcccggtaggtgtttccagtataggcctttaccgctgcgacttcctccgccgttagctcctggagtcccatcgatcgctgcttggcattgaccgccgccaggtcgccggtcggcagcccgttggcgaacttgcgcacgcccgctgcgcgctgggcccccgagtacctcggaggcggcgggaggccgtcgcgcggggtggaggccggccgggaggccgtcatgtccaccgcggtcggggtcacgccctgcttcttggcgacggtcgcctcgttgaaggagacggtggccgtgccctgcttcttgagctcgtactccgcggcctccttcagcttcaccttcatggttgcggagggctcgtagcccgccatcttcttgaccagcttgttggtgttgatcgggcccaggccctgctgctttgccttcttgtacgcctccagggcggccttaccattggcgggcagctgggctgtgaacttctcgatcttgccgttggagacgaagccggtcggcttggtgaaggcggcgttcaggtagggcttgcccgcggccttggccgaggccagctggtactgtgccagctccagtaggtcgtcggcaccgggctgcttgatgaccccgaagaccgacttcatggcctcgtaggcgtcctgcggaccaccgcccgcagccagtacggacttcaccttgtccagggcgagggaggacgtgccgccgagcttctggtccgccagcttgggcttctgcacggggcccgacaccgcctccttgaccgtcgccttctcggagagcgagaccgcgtggttgtaggagttagggctggacttcttccagttggacttccaggtcgcgatgttggtgaccttgacgtccgccgcattggcggggaactgcttcgccagggtctccgccaggtcctggttggacagcatgcccttctgcatcagcttgatggcctcgtccttcagctgcgccgaggtgagggtcagggcagactgggtcgccgccgcctcgggcgccacgacagccgcggcgccggacgagggcacgggcacgacgtccgggatgggcttggccgccacgaccgggccggaggccttgttgggcagcaggccgtccttcttcagctgggacttgtacgaggcgatggacgcctgcttggtctgcgcctccgggaactcggcgaggacggccttcaggacctggtcgtccggcatgccctgctgcagcagcgccttggccagcgacccgaccgaggtgtgcttgcccgcgacctcgtacggcagggcggggccgcccgggagcgggaccttggcgccggccggtggcacggggaacttcttcgccatcgcgtcctttgccgcctggatcgcgggaccgaaggccttgttgaactcgatggcggagaggccctgggacgtcacggcgctcgggctcagggcctggccgtagacctcagccacgagctcgtcggcgctcgtcaggtagtacgagtagagcttccgggcgtccggggacaggcccttcgccgaggccttcagggccgccagaacgtccgggtcgagcagcaggtcgtgctgcttgtggagcaggtggccgagctcgtgggccgcgacctgcttggcctgcgcggcgggcaggacggacagcttcttcccgctcaggaccacgcccttgccggcctggtagtacccgtacgcgccgggcgacccgtccaggtcgtcgacgacggtggaccactggccgccgacggcgtgcttcaggttcggcgggagggaggcgtccaggtcggcgacgacgtcggccaccgccttggcctgcttgagggcgccggcgggcaccttggacgcgggccccaggttcagcgcgccggccttgttcagctcggacttgtaggaggcgatggacgccgccgaggtggacgcgtccgggaactccttcttgatctggtccagcacctcggagggcgacatgccctgctgcagcagcgacttggccttcaggcccacgccgggctggatgacgttcagcttgtcgccctccagctcggccttcagctccgccagggagtagggcttgcccttctcgtcgacgaacttctccagcggcaggccgtcccggaagagctgcgccttgcccttgcccaggacctcgtcctggaactccttggactggcccttcagccacgactggtagttcgtcgaggtgggggtctgcccgatgttctcgtcggcccacttgtcgcggcgggccttgatggcggcgttgcgctcggccgcggacatgcccttccacttgtcgccggcggcctccttggcctccgcccggaagtcgatctcacgctggcggcgggtgcgggtgtcggttaccgtgggccggtcgcccacgatctcctccccgtgcagcacgggggcaacggtcgagcggcagttcgggtgggcgggcgggcgagggcccttgtcgatcgggtagacctcgccgtcccggctctgacagacgggggaggtgcggccgtccagggtggcgacccaccggacgcccttgatgacgtcggcgttggcatcccaggtcgcctggcgcgcggcggtggagacgtggttggtcgccgtgcgggcgatcatctccgcctcccggcgggtggtctccagcacgccgtccttgtagccgccggccttggtgcccctgatgcggcgcaccatctggtcgatggtctcgccctgcaggacgcccagccggatctgctgctcgatgcgggcgacgtcgttggtcgccatcttcccgagccacccctgcagcgggatgccattgatgggagagcccgcgacggccttgacgaccgtggcgggcactgcattgaaggagagggcgatcggcgtcgccccctggagcatggagacctcccactcggcctcggtcttggagaggccctccatgtcctcctcgagctccacctggatgcgctcggcgaccgcggcgcgcatccggcgcacctcggtcaggaggcccctgatgcgggcctccgaggtgtcggtgaggcccgactgtagcagggcgaccagctcggcgtcgctctgggccagcagctcggcggacttctgcgcctccccctgggagaagcgcagcagcctgatctggtggcgtacggtcgcgtcgaggatctcctcgttagcggtcttgggcatcactcgtcatccggggtgggcgggtcgacctgggccgggtcctggttgccgggcggctggttgcccgggggctgctggcccggtaggcccgtgccgttgccgccgccgaacatgtcgcccatcgtgttcttggcctcctcctcgaggaactcggcgtcctgctcctcgtcgaagtcgtccgccaggatgccgcgcttctggagctcgcccaggtaggtcttgcgggagatgtcccgctgcgcgcgggccttgttcagggtgtccagctcggcggcgtccgcctcgccgaggtccacgtcggagtcgacctgcaccgagccgccgtcgtccttgccaagccagttggccgtgtacttcatggccagctcgacgcagtcctggaagtcgtgcacggtggacgccaggtaggacgagctctcggccgagtccagggcgcgcccggtcgccgtctcgtcccccggctgcttgcgcatgtactcggccccgtaggtggccatctggtcctccagggcctccaggtcggtctggcccgccgcgatggccgcccccgtgtgctcgacgtagtaccacttgccctgcacgtcctcggtggtgaggaagttgttggggccgatggtgaccttctgctcggcgggcacgcccgcggccgccaggatggggaagcgcgacacggtgaggacgttgcgctggtcgctcttggattgccagtgctcgacgttcaggtgggccaggtcgatcagcgggggcttggcgtccatcagcccgacgcgcttgcctgcgtagaacgtcacgagggggatgaagtccagggtcgtggtgccctcgctctcgatggcccactcgtccttcttctcgtcgaccagcttccatacctgccagatgccgggctccaggacgcggacccgctcgatctcgacctcctcccagccgacccgctcgacggtggtctccttgatgcggacgtgggtcagcacctccttgccgttgaccatcatggcgtaggcggcgatgaggcactcgggcttgatgtgcacccagtacgggcgcatgccctcggccctgtcatcggccagggtccgggcgaccgccacgccggcagcgtcgaccttctcctcgggggtggggtggtccaccaggacgtgggagaagcccttggcccagccctcgcggaaccaggcccggcagaacgactgcaggttggtgccctgcatgtcgatgtcctcggacagctcctcgaagtcggcgtcgacgtcctcgcccaggacgatctgctcccggaacggcttgccggccagggtgtccagggtctgctccgtcatgttgagcaggacggcccgctcgaggcgggactcgtagttcgcgttggtctcgttgtcgtactggggaaggtactccttcccggcagcgcgcatcgtggtcgtgccgcccaggagggcgtcgatcatcttccacaggggctgcatgcgcaggtaggccccggacggcgtggcgaccgtgggcttcttcttgggtccgtcggccatcgcgggctccttgggctagttgtgagctgatgctcgcgatggtagcccgggaggctgctggttgtgagccagcagcctccgcccgtcacatgtcggccgagctcctgaagcccaggaacacagggaagcgcggcgcgtccttgctgccgcccgggaagaacttgtacttcacgaggcggccgacgagcccgtcgtgccggcggctccacaggtcctggcgctggtcggcggtgaagcccgtgccgatggagaactcaacgcccttgaacggcccattgacggcccgcacgacgagggcgcccatggtgcccatgcccaggaggttctccttgctgtggccgcgctccgtcaggccgagggcactcgtgctggcctcgttggcgttgtgcatcagctcctccatgcggagcagctcggcctcgccgtcctcgaagcgcttcagcttcagcaggtcctgcgccctcagggtgccgcggccgaacttgtagggcgagcaggcgtccctggccatgaggccctcgtacccctcgccaagcacggacgtctcgaccgacaccagctcctccggggtgttgacctcccagtgcggcacgatgacgcacggccggccgagcgccatcacgcgccggccggcctcgtcgtggcgcttgttgaagcccatctcggggtgcgtcacgtcgtcgaagacgtggaagcggaagtcaggctccccggcgatcgacatgaccccgcgggtcgtgttgttgaaggccatcctgtccgccgggtcgccgacgatcagctccccgtccaggccgttgtacatcggctggccgagcacggcctgcacgtggcggttggggatgggcttgaggctgcggctcaccgcgacggagtcccgcacgatgcagcggatgccgtccagcttcggggaggtctgcagcgggaagcgcagcttgaggacgtcgtcgatggacgccgccagcatgggtcggaagctcatcagaagtcccccggcgcgacctggaagcagggcacgccctcggcccgccacatgtccaccaccgacttccggtcgtcgaacacggccacgagcctggcacggtcgtccgggtgcagctgggagagccacaggcgcttgagcttcacgtccggctggtgatcgtgggcgaaccgcatccgcagggccatgcccatgaacgggtcgtgctcccgcagccacggcaggtgcttcagcagccaggcggaggtcttgtccgacacctcgtcggagcggccggaccacacccacacgtcggcgcccgccaggtgcagggcgttggcggtcctgatgaccgcctggcacggggtgtcgcggtcgcaggcggcgtagaactcccgccactgcttggggtcggactcgacgaggtgccggcggtggtcgatggtcgccagtgtgccgtccaggtcgaagatgtagaggggcttactgttcacgggcttgctccagggcttcctcgcccgcttgggtcaggtacattccgacgccgaggcgccggtcgatcacgtcgagggccacgttgacctcggagccgctggcatcgccttcggctaccatgcgggtcagctcggagcgcagctcctccagctcgcggatgccggtctcgtccgccctgcagtacaggcggatgccctcgcggatgccgcggtcgaactcgagcgcgccctcgggctcctcgaaggcggaggcgctccgctcccacagccggtcggccgcctcctcggcgtcctccgccaggtgcagctccgccagcgcgtactcgatgccggcgcggtacatgttgccgggccgccggatcgaccgtgccagccaggcgagcgagatggcgaacagcacgatcgccagggtgagccagaagttgggtggtgagaagtccatcggtgttctccttgggtaatagagaggggaggagcctatcatggcccctccccagtcaaccgcgtaccatcagtccatgcggtccaggacgtacctcgccacgccgccctcggtgcggaccagcacctccagcggggtcttgtcgtccagcctcaggccggaggcgtgctggacgccgcgcggcaggcgctccaggcgtgccgagcgggagtgggcctccagggtggcgcgcacctcgtgcagctccgagcgcaggcactcggggaacagggcgagcgaggcctggcgctggtcggccgcgccctcgatcatgagcaccaccgagttgccgtggtgggcgaacccgccgccccactgggagggctgcttcgtgatcccgaccaccttggcgcggcccgggcggaggccccagttggacgccggcgagccctggtggtagacgtaccaggcgaacgggttgcggcactccacggagtcccactgcaggatcggcggcgcgtcggggtggacggcagtcgtgatcgcgcagaagttgccctggtggggcaccacgacctcgatctccagggcgcgcggcaggacgtccctagcgaacctggcgtaggtcacccgctcggcgcgggtgttgagcagcgcccgctcggtggacagccgctcgtgctgcagcaggtggccgaacaccccgcccgcctggttcttcttgggcggctgcggctgccactcgaacacgacctcgtcggcccgagcggggcgccgctcgagcgaccgggcgagccccatgcgctcaaacaggcgctcggcctgcgccacgttgccggcggtcggcgccgcctgggcgcgctggtaggtcagcgggtccgcgcgcttgttgtggttgcggcggatggactcgacggaggcgccggagcggatgtcgtcgatcagggcgccgagcagcgaggagcgcggggtgcaccaccccttgccggccatggcgacgcggaaccacaggcggcggttgacggcctcgccggagaggtgggccatggccctcttcgcctcgatcaggaactccgccatcttgaccgtcttgtcggcctggttgaggccgcccgtcatcagcatgtcccgggcgcgctccaggtcgcccagggtgaactcccggagggcgaagtgcaggtgcttccggttctcgcgctgctcggccgccacctgggaggcgtccttggagccggaggtgtgggagtgcacgccggggttggtccacaggtgggaccagccgccctgctcgcggactccccagtcggcccggccgccctgctcgcggactccccagtcggcccggccgtcccagaagaactggtccaccacgtggccgcgctcgacggcctcgcgcagggccttgacgaccttgcggtaggggtgacgggagcccagcagggtctcatcccacaggaccgacttggtccggccgtccgaggtcagggtgaccaggctgccgtagcggtgcacgaacgagcggcagcagttgcagtcgtggtactggcggtccagcgggtcgaactgctccaggtagaggtcgaacaggtcgcgcccgacgttcacccggaaggcgttcggcacgacgttcagctgggccttctcgagggccgcgtgcatcgcctgggggcacgtcgtcgaagcgcttggcgaaggtaggtacgcgggcgtggcccatctcgtagggccggtcgcgccgggcctcggacccggtggtctgctgcatgtggttcactggtatctcctgaccgggtgccgccaggcccggatagtaaaagaggggcgacggtcacagtgtaccgccgcccctcctctggagatgccgctgttcctagtttggggcgctggtcagccgaaggcgtcgtcccagctgcccgtcacggcgcccttggagtagtccgtcgccctgttctcgaagaagttggtgtgctccttcccgaagacgatggcgtcgacccagcccagggggttcttgctgacgccgaacagggcgcgctcgccgagctgggcaaggcgctggtccgcggtgtagcggatgtactgcttgacgtcctcggcggagaggccctggttctcgccggactcgtaggccaggtcgatgaaggcgaactccagctccaccatcttctgggcgatctccctgatgcgctcggagtgctctgccgtgcggaggtggggatgctcggccagcagctggtggtacaccttcatcatgaactcgacgtgcagggtctcgtcccggatggaccagctcaccacctggcccatgcccgtcatcttgccgaaccgggtgaagttgagcagcatgatgaagctggagaagagctgcagcccctccccgaaggccgagaagaccgcgatgtccagcgccaggccctccaggccgtcccggcgctggaacaggtactcgtgcttgtccagcatctccttgtagcccatgaaggcggagtactccacctcagggatgcccagctcgtcgatcagggtggagtaggcctggatgtgcacgccctcgcgggcggcgatcgaggccatcgccatgcggatctcggtgggcttgaacgtcggcaggtaccggtcgatgtagccggaggccacgtccacgtccgcctgggtgaagaagcggaagatgtgggtcagcaggtggcgctcccggtcggtcaggtcggcgcgccaggtcttgacgtcctgcgtcatgggcacctcgcgcaccagccagtgcatctgctccgaggccacgaaggcctcgtacgcccaggggtaccagaagggcttgtactccgctctcttcgagaagagggacggactgttgtcgatcatcatgggttgttcctcagccttcacacgcggtgcactcaccgttgaggttgcatgctgcgccgctcacctcgggcaggtcaaccgtctcttcggcctggggcgccggggcgggctcgcgcaggatctccggcatcacgccgaccgaggtggccttgacggagctggagcgcaggtagtagagggacttcaggcccagcttccaggcgcgcatgtggacctggtgcatggtcctcgtgtcgacgtccgccggcaggaagatgttgaggctctgggcctggcagatgaagggctgacgctgcgcggccagctcgaccaggacgcccgggtcgagctccgaggcggtcacgaacagagccttgtccgaggccgacaggaacggcaggtgctgcaccgatccgcgctcgaggaagacgctgcgccagacgtcgtcggtgtcgtggccgagcgcggcgaggcggcgctgcagcgcggggttcttcatgatccccgtgccagccatcgtcttctgggagaaggcgttggcgaccatcggctcggtgctcgggctgacgccgccgcagatgatggagctggtggcgttcggcgcgatcgccaggaggtgggcgttgcgcatccccgtgccgaccaggtcctcgggctccccgcgctcggcggccaggcgcatggaggcggccacggcgtgggccttcagctcggagtacagcacgacgttgaaggtcgcggcctcgtgggagtccagcgcccagccctggtcctggcagtaggtgtggaagccgagggtgccgaggccgatggagcgctcgccgaacacggaggcgaccgcgcgccacatgccgtggggcgcctgctccaggaagacctccagggcattgtccagcatggtgaccaggtcgccgatgaactgctcccgcacgtcccaccactcgtcgcgcttcgccacgttggtcgaggacaggcagcagacggccgtgcggtccggcgtggtcggcagggtgatctcggtgcacaggttcgagtggttgacccggaggcccttggcccgcagggaggggtgcaggtcgcggttggcggcgtcgatgaagaacaggtagggctcgccgaggcgggcgcgctgctggagcatctggatccacaggctgcgggcctggatcgtgtcggtcacccggccggagtgcgggtcgaccagctgccaggggccgttgtcctccaccgcccgcatgaaggcgtcggtgacgttcacgccgtggtggaggttctcgttcttgcggtgcacgtcgccgccggtgggcgatcgcatgttgatgaactcgacgatctcggggtgggagacgtccaggtagaccgcgtgggcacctcgcctggtgcgcccctggtggtaggctatggcctgcgagtcctggacgtgcatgaaggccatcgccccgggggtgtccacgcccttggcggtcacctcgccgatcgagcggacgcggctccagttggtgccgatgccgccgccgttggtcgagagcagggcgttctcgccgaagttggcgaccaggccctcgatggagtcgtcgacgtcgttcaggaagcagctgatgggcaggccgcggttggtgccgccgttggagagcagcggggtggcgaacatgaaccactgcttgctggcgtagtcgtacaggcgctgggccagggcgtcgtcgccgccgctgaaggccttggccgcgcgggcgaaggcctgctggaaggtctcgccggggaggcagtactgcttggacagggtggcggtgccgaactcggtgagcagggcgtcgcgcgcggggtcgaggacaatccccgtcttagggtcgatcatggattcactccggtggttgggccttggcccgggcgtcgggccgagcgcgcatcgtgacgcgcgcacgctcgtagcgcgagccggcgaaaaagaaagccccgacccttgtgggatcggggctctcagcccttccaactcaaccgatggaatcaccatgaccgggctgtccagacccggtaggcgcatgatgccgcgggaggcgtcggccgcgggccgtcgttcagtcccagtgggccgagagcatctcgatctccccgccgcggcgcctgaactcggccacggtctcggcgcgctcctccctgggctgctcgggctgaggggccgcctcgtccgccagcctggagagcctctgccggcgcagctcctggctcttgcgctggaagtagagcctgtcgtactcccgcttggcctcgcggtcccggccgcccaccttcctggacgtgtccacggagccctctatgagcctgtacagcttccggtgcccctggggcctgcaggacgcctcccccgccctgcgcatcttgcccaggacgtccgtgaccgcgtcacggtcgaggcccgcctgcgaggcgatgtgggagatggagtgctcgcccgggttggcctcgagccaggcccggacgcccttgcggacggaggagtaggcggtcacggccgcgtgaacccgggctcgagcatggcgcgcagctgggcgcagctcagcacagagcgatcgatgccgccccggccgtcgggggccatcacgttcaccatcagcggaccccagctcgggctctccgcggtgctgatgtagtggggcacgctgaccaccatgtgggacactcccagcaggtcgaacacggtgcccatgggggtgttggcctcgagccacgcccggtcggcgcgctccctggccaccgcccgcaggaagctctcctgcttctcggccagcatgctcaggccgccgcggctgcgacgtgcctggttgcgctcgtccaccagcttggtggcctcctcctcggagatgggcaggatctggtagggcacgatggcgcccgggtcgaaggtcttcatggtcggactccttggtagggagctcagtttaccgggcccagccatggccgaacgccatcgaactccacaaaaggcgaagcccccgatcggcgggggcttcgagggtgctggcaggggtcggaggcgcttatagcccgccaggctggacgacagtttgctccactcccccatggtggagtggtcccgccgatcctgtcctgccagtctgcaccggggagctccctagggctcctgcaggctctgcgaccgttacccggggagtgggtcgtcgtcggcgggcctgctcaggcgtgcactcctgtgaacatcataagggagctcgccggtacagactgttgggtgggtcctgggcaggttgcgggcctgcttctcctcctggcggcttcaaacctaaccgggaggtgtcctaatccacattagacgacctggaccatggtgtccccgccctcgggtggacctccgggcggggacgtgacgggaggttgatcctgctgcgtggacctttcggatggtcagcccctggaccgctagatcgtgggcgtcgcctcttactcggtgccagcctagcgctgtctcgtcggtcagcgtgtcggaggatggggtaatgatgccgggccgtccgtggcccgcacaccgtcgttcagaagctgccctgccggacggccttccgcttgtgcatgatgcggtagcgggagtcgtcgccggcgtggtcctcgacgtcggtgtcgacgtcgtccgggtccttctcgtcccgcggcatgggcggcacggtgcgcacgaagtcggggcagcgctcgcccaccacgaacacgccgggcgcctcgcgcacggtgggcctgggctcgtccatctcgtccaggttgagggagttcttcagcctcttacggaactgctcccagccctgcttgcgcgcgttgtccgcccgctcccacctgatgcccttggcccgcatgtcgcgctcgatgcagttgccgttctcctcggaccagatggcggggtccgcggggcccggcttgacccggccggcgaggcccatgcccacctccctcaggcggatgccctcggcgatgtccgcggccagcatcttgaggccctcgttctccgtgcccttcttgaggccgtaccactcgccgatgcggaacaggtcgcccctgaccgtgcgcatcctgcgcccgtccgggaacaccaggtccgtgccgtctgactccgcccaccagccgaccgagaagggcttgctgctgccccagtcgaaggacctgtccaccgtccaggtgcgcggtacctggaagggccgcacgacgtgggtctgcgtccgccacaggtcgtcgaacatgccgccggaggtgatgtcccagctgccgtcgagccaggccgcgatctggccggggttcgaggccgccgcccggatgcggttgatgtactcggggtccgcgtccagcaggatgcggttctcgctgatgtggccgtggatggcgatgcggtcgggctcgcccggggtggtgatgatcttgccccgcatgccgggcagcctgaaccgcagcttgacccagttgtgccccttgccgtacgggttggtcgtggcgcgcaccttgcggggcatgcccggcaccgtcgagcggcagcaggagaacatcttgaggtacatctcggaggtggcccagttggtgagctcctcccagccgatccacgggtaggcgtggccgtggtagttgtcgtagtcgtcgaccttcgccatgtggcgcagcaggagctgctcgccgtcggggaaggtccacacgtagtcgctctcgttgaacttggcgcccgggaaccagagcttgaaccaggccttgctcttggcgaccacgtcggagagctgcttgtacgtggcgcggaacaggacgccgcgccaggcggcgccgtagccctggcccacgtgctggcagaagtccgccaggagggcgtcggtcttgcccgggccgcgggtgccctcgaacaggcactcgaagaccgggcaggtcaggaagaggacctggctgccggcctgggggatccaggccttggtccgtgggccctcctgggcggcctgctgcggggtcttcttgcggcgccagtggggtggctggtatgccatcagtcctcctcgtcggccgggaaggccctgtcggggtgcaggaccaggcagtagcaggccgccaggacggtccccagggcccgccaggcgttccgtgcgacccaccaggcgcacttgaggcgcttgcccaggggctccctggcctcggtcctccagaagcgcctggcgcgggtcatcatgtagcccccgcgcaggaggtgggccgcgaagaccggctcggcctcccagttctggtcgcccaggatggacgcgccctgcgaggacatgcccaggagggtgtccgccaggtcgtgggcctggcgcccggtctcggagggggctcgccaggtgcccctgacctgggtcgccaggatctcgccccggtcgtcgagccaggcctccaggtagacgtcggggtcgcgggagtagacgtcccgctccatgcggcgcttggaaatgttggtgacctcggccacggttcacgctcccaggatgcggtctatgacggtgttggcggacatgagctgcttgagccagcgcttgtggtcgtccctcatgcccggggtcatggtcttgtacttggcgaggcggctcagctgggactcggcctcgcggcgccgggcccatgcgacccgcacctcgcgcagctggtccgccaggagggcatcggtctgctccttggtcggggtctcgctcatggcaggtgcccccaggtcgcgacctcgcgggctgccgcttccatctggtcggcctccacgctgaagtcgtggtacgtgtaggccatggactctccctgggcggcgcgctgctggttctcggcctgcatgcccaggaccctggcatgggccgccagtatgttgcccagctgctggacgcatgtggcgttcatcggcgctccatcctggtggcgcactcgatggtcaggccgtagcccagggccagcctgcgcgggtcgacctcgttgccgcacccgcaggcgcagtccccgtcctcccgtggtgcccatcgcttctggcgcgcctgggaggcccgtcgggccgcgtctatggaggcctcgtcgtgcgccagggactcggctgaggcgcggtcgatagggtcggggaagtggtctgcgggctggatgtccatggtggtctctcggggtgtggaaagggcgcccatcagggcgcccggcttgtgctgctctgcgattatcccgcgggcgggggtgcgtcaccgccctcgttgttcccggcgtacttggcctgctgccgctgcacctcctgtgcccaggtgtccttgtcgatggcggccgggatgaccaggacgccgccggccgcgccggtgtgctcgaccttgtggttctcgcggtacttgtcggggcgggcgcccttcagcagggtctgcatcagggcgtcgctgtacttcctgacgaccagctgcttctcctcgccggtgaccttgtcgatgaccgtggtcgtcatgccctggtagatgaccggctcgtcgtacccgtcgaccgcgcggcggaacgcctcggcctcgatgcggtcggccgcctcctcgcgggcgatctcgaacatcgtgttgaaccactcggaggtctccctccagtgctccacggcgccgcgggacacgccggccgcgcggcagccgtccaggacgatgccgcggagcgcgaacgcccgcaggaagaggcggcgccgctcggcggacatgcgctcctgggtgttgaggccctcgagctcccactcgacgagctcgagctccgagaccgggccccgctcgctgaggaagaggcgctcgtcctcggtcatgttcttgacgctcactaggcgctccgtgtgctgtgctggtgcaatggtccgatggtaccgccgcccaggccgggcagtaagccagcggtctcccggggccgacccgccggttcctcgtgcacgaggctccggggaccgcgcctggacgatccggacgcggagcttttgaggggcccgccgtctcggccaccgcccgggctcggccacgaccggaccgatcgcggggaattgccccgcaggtttgccggccgtgttgcccagggcggaccgtgtcggccgtgtccaccaaaaggcctagattagtggatttagcaggaagatctgttttaaaggcttatacaatctaaacctttattaaaaagatctagataagataaaactatgattctgatgcagatttcggcaactgtctgaggttctggaccgtctaggcatctcggtggtggtgccgtcatggtctcggtgtcgtttttcctggtacaacaccgagccaaagcctcgtacggtccgtctgcctcagattccggagctaagtccttgatccgtaagcctcagacggctcgtacggccgtctgagcctggctttccgggggctcagaaggctcgtactcccgccgaccgtggccgagcggggcccccggttcagtcgagggcgtccttgggccaggcgatcttgctgcccagcttggcctccatcatggcgcggcagtcctccaggctggggagcttcgacgcggaggcgcggcccatgcggtccaccttgaccgcgtagtcgtcgtccgccggcttgacctgcgtgttctcgagcctgccgcccaccagcttgttgagccgcatgccgaaggccaccgggtcggcggggcggtacaccctctggtccttggcgaactccgcgtagtccgaccggaggtgctccttgatgatggtgaccgcgccctcgtgccagtcgctgcgggcgttcgggaggatgccgtcgaggagcttgttgtaccaccaccgctcgacgtcgtccatggtcatcaccttctggtccacgagggccgacgtggccggcacgtcgtcccgcggtgcccagccgtcgatgtcccgcatcagcaggtcgtacagcatggcctggatgccgccgtccctgtacatctgcctgttgaggcggctgaagaactccttgtccccgcggcggttgttgctcacctggaagaccgcgaagcggcgctcgccgtcgaggcccgccggcacgacccagtcgccgttggcggccatgaggatgtggatcatgttcttgcccgtcacggcgtcgcggcccttgccctcgtaggcgatggtcggctcggtgaccagctgcttcagcttggcctcgcccgacttgtcgccggcccagaaggcctcgtcggcgaacaggcagatgcagttctgcaggtgcgagttgaaccggcccaccaggtgctcgggcgaggagatctggaggccgtgcgatcccgccaggaacgaggcggcgcggcccagtgtgcccttgccggtgcccttctcgcccttgaagcagagcgccacctcggcggcctgcgacgggtgctggaccatgtaggcgagccagttcatcacgtactcgtaggaggtcctgtcgccgtcgcacagggtctccaggaccagctgctgcagcagggaccagtcccccttcttgggctgcacggcccagccgcgccacaggttcagccagccctcgtgcgtctgctcggggtcgaagatgatgcccttgtactgccggcggtgcggcgacctgatccacagcgaggacttggtcaccagcttgtcgtgcatctccacgagctggttgcagtagaggttctcgaagtcctccttggtggagcgctggaagaacggccgcttgaggacggggtccagctcctccgtgaagatgcggaacttgccgccctccatcacgacgcagtgggtctcgttcatctcctcgagcacgcccgccaggccctcgagcttcggctcggcgcgcagcacctcgtcgtcgacgccctggccgagctcgtcggggtcctcccacgtgtcgaagtcgtcggccgcgtcgacgcgggtcacctcgccgcccacctcctggaccaccttgtggaggaacttgatggtgaccggccggccgccgcggcccgagagggcgtgcagcgagtcccaccggcggccgatgatccaggcgtcgtcctggtactcggggtcctgcgtggaccact

1. A composition for plant disease control, comprising:
a bacteriophage with bacteriolytic activity against bacteria; and
an organic silicone-based surfactant.

2. The composition for plant disease control according to claim 1, wherein the organic silicone-based surfactant is a silicone oil having one or more polyether groups.

3. The composition for plant disease control according to claim 1, wherein the organic silicone-based surfactant is at least one selected from the group consisting of trisiloxaneethoxylate, polyoxyethylene methylpolysiloxane, polyoxyalkylene methylpolysiloxane, and a polyether polymethylsiloxane copolymer.

4. The composition for plant disease control according to claim 1, wherein the organic silicone-based surfactant is trisiloxaneethoxylate.

5. The composition for plant disease control according to claim 1, wherein the organic silicone-based surfactant is polyalkylene-oxide-modified heptamethyltrisiloxane.

6. The composition for plant disease control according to claim 1, further comprising an agriculturally acceptable carrier and/or an agriculturally acceptable solvent.

7. A method for controlling plant disease, comprising a step of contacting the composition for plant disease control according to claim 1 to a target plant.

8. A method for controlling plant disease, comprising:
a step of preparing a composition for plant disease control by mixing a bacteriophage having bacteriolytic activity against bacteria with an organic silicone-based surfactant; and
a step of contacting the composition for plant disease control to a target plant to be controlled.

9. The method for controlling plant disease according to claim 8, wherein the organic silicone-based surfactant is a silicone oil having one or more polyether groups.

10. The method for controlling plant disease according to claim 8, wherein the organic silicone-based surfactant is at least one selected from the group consisting of trisiloxaneethoxylate, polyoxyethylene methylpolysiloxane, polyoxyalkylene methylpolysiloxane, and a polyether polymethylsiloxane copolymer.

11. The method for controlling plant disease according to claim 8, wherein the organic silicone-based surfactant is trisiloxaneethoxylate.

12. The method for controlling plant disease according to claim 8, wherein the organic silicone-based surfactant is polyalkylene-oxide-modified heptamethyltrisiloxane.

13. The method for controlling plant disease according to claim 8, wherein the step of preparing comprises preparing a composition for plant disease control by further mixing an agriculturally acceptable carrier and/or an agriculturally acceptable solvent in addition to the bacteriophage and the organic silicone-based surfactant.

14. A method for producing a composition for plant disease control, comprising mixing an organic silicone-based surfactant with a bacteriophage having bacteriolytic activity against bacteria.
